United States Patent Application Publication US 2009/0214546 A1 - sequence listing, part 2

SEQ ID NO: 77 - DNA, 1320443 bp, Mus Musculus
  misc_feature (19734)..(19911): n is a, c, g, or t
  misc_feature (23463)..(23482): n is a, c, g, or t
  misc_feature (55851)..(55870): n is a, c, g, or t
  misc_feature (74115)..(74134): n is a, c, g, or t
  misc_feature (90276)..(90295): n is a, c, g, or t
  misc_feature (114894)..(119389): n is a, c, g, or t
  misc_feature (165157)..(165204): n is a, c, g, or t
  misc_feature (210007)..(210113): n is a, c, g, or t
  misc_feature (213162)..(213245): n is a, c, g, or t
  misc_feature (230585)..(230660): n is a, c, g, or t
  misc_feature (239114)..(239295): n is a, c, g, or t
  misc_feature (246740)..(246759): n is a, c, g, or t
  misc_feature (259924)..(259950): n is a, c, g, or t
  misc_feature (302123)..(302142): n is a, c, g, or t
  misc_feature (332612)..(332782): n is a, c, g, or t
  misc_feature (366320)..(366339): n is a, c, g, or t
  misc_feature (367489)..(367508): n is a, c, g, or t
  misc_feature (368888)..(369023): n is a, c, g, or t
  misc_feature (382954)..(382973): n is a, c, g, or t
  misc_feature (384537)..(384556): n is a, c, g, or t
  misc_feature (392500)..(392698): n is a, c, g, or t
  misc_feature (423796)..(423815): n is a, c, g, or t
  misc_feature (427169)..(427278): n is a, c, g, or t
  misc_feature (431747)..(431766): n is a, c, g, or t
  misc_feature (433008)..(443697): n is a, c, g, or t
  misc_feature (452141)..(452160): n is a, c, g, or t
  misc_feature (461251)..(461270): n is a, c, g, or t
  misc_feature (504971)..(505081): n is a, c, g, or t
  misc_feature (529612)..(529641): n is a, c, g, or t
  misc_feature (536069)..(536088): n is a, c, g, or t
  misc_feature (561972)..(562144): n is a, c, g, or t
  misc_feature (592650)..(593871): n is a, c, g, or t
  misc_feature (595413)..(595841): n is a, c, g, or t
  misc_feature (598768)..(598787): n is a, c, g, or t
  misc_feature (603013)..(603032): n is a, c, g, or t
  misc_feature (611664)..(611683): n is a, c, g, or t
  misc_feature (658125)..(658516): n is a, c, g, or t
  misc_feature (666683)..(666702): n is a, c, g, or t
  misc_feature (670213)..(670532): n is a, c, g, or t
  misc_feature (672495)..(672514): n is a, c, g, or t
  misc_feature (673881)..(673900): n is a, c, g, or t
  misc_feature (676980)..(676999): n is a, c, g, or t
  misc_feature (695667)..(696087): n is a, c, g, or t
  misc_feature (729288)..(731468): n is a, c, g, or t
  misc_feature (733208)..(733227): n is a, c, g, or t
  misc_feature (754486)..(754939): n is a, c, g, or t
  misc_feature (770042)..(770061): n is a, c, g, or t
  misc_feature (803733)..(803776): n is a, c, g, or t
  misc_feature (834221)..(834240): n is a, c, g, or t
  misc_feature (839603)..(839622): n is a, c, g, or t
  misc_feature (879416)..(880036): n is a, c, g, or t
  misc_feature (880862)..(880881): n is a, c, g, or t
  misc_feature (932349)..(932368): n is a, c, g, or t
  misc_feature (933854)..(933873): n is a, c, g, or t
  misc_feature (940729)..(940748): n is a, c, g, or t
  misc_feature (941843)..(941862): n is a, c, g, or t
  misc_feature (944233)..(944252): n is a, c, g, or t
  misc_feature (945269)..(945288): n is a, c, g, or t
  misc_feature (948049)..(948068): n is a, c, g, or t
  misc_feature (970891)..(972243): n is a, c, g, or t
  misc_feature (999672)..(1001940): n is a, c, g, or t
  misc_feature (1003384)..(1003403): n is a, c, g, or t
  misc_feature (1036052)..(1036071): n is a, c, g, or t
  misc_feature (1037095)..(1037114): n is a, c, g, or t
  misc_feature (1040403)..(1040422): n is a, c, g, or t
  misc_feature (1044680)..(1044699): n is a, c, g, or t
  misc_feature (1050614)..(1050633): n is a, c, g, or t
  misc_feature (1158174)..(1158406): n is a, c, g, or t
  misc_feature (1158953)..(1158978): n is a, c, g, or t
  misc_feature (1162139)..(1162163): n is a, c, g, or t
  misc_feature (1177733)..(1177752): n is a, c, g, or t
  misc_feature (1180705)..(1180724): n is a, c, g, or t
  misc_feature (1228153)..(1228280): n is a, c, g, or t
  misc_feature (1230072)..(1231486): n is a, c, g, or t
  misc_feature (1274809)..(1274828): n is a, c, g, or t
  misc_feature (1286639)..(1286861): n is a, c, g, or t
  misc_feature (1292701)..(1292842): n is a, c, g, or t
  misc_feature (1315650)..(1315830): n is a, c, g, or t
cagacacctctgctgattgactcactcctggcttgatacatctgccttggggacacgaatccggaatctagtttccatcccccagccccctgattttggatgttcttttgattctccacagacctgggaaggtaaccgcaagccataccatctgcagctcacagcacctcttggaggttactactgacagttttcattacacaggcttctgtgagtgcttatgtgtttgtatgtgttcctgcgtgtgggtgcctgcttcctcgtaaaagagattgtgtgagtgtccgtactgtgtgtggggatttgtgagacaagcaaaggaggtataccgtacaagaggagatctaaacagcgtgataaaaatctccaggcactggggctcacaatctctagccccccctcctcacaccgccccttctttgccctactcccccggctcctttcgtctttgatgagtttttggctcactttttggcggagtctcttggacatgttctgctgttgctgaaggatcaaataaatggaacctttgaaagttgattatttttctcttatgtgacaaacacacacagagagagcgcgaagaggaaggaaattagagtgctgtatgacaagctagaggatttaaatttttccttggtgaactttgaggatccgctgagaaggtaagtcaccaggttacttagctctggtaccttctttttttacaacgtttgtttgtttttttttttttttctgggctgttttcagaaatccatatgaggttcataagcgctcacttccagattgtaatgcagagaggaaccagtgtgtggcattcggggttattctcatgccaaggagggtatttccatctgtatgggcccctcttactattttatacccctcttcttggtgttttcttggtgaattcggagaacatgaaatctgcaaattcgtgataaaaattaaaaccccagcctatttcgaaataaatctcctaaactgggggtttggttgggaaggagggggatcattcaggttaactgctctcagaagctctgagacagacgcaaacctgaacctactcagagactgccatgagatgtcagtgggggtgtaattcagagttttatgacaacttaaaagtagaccccttgcagattttctttcttcctttcctttcctttctttttttcttttcttttcttttcttttcttttcttttcttttcttttctttctttctttctttttttttctttttctctttctttctttctttttttttttttttaagaacagttttgtgtgctctgggaagtggtggctgtgttcccacagcttctaataggagcaaatgagaacaaagtgggaattgttttgtgttttcagcctcgcttttggattgacttttccctattgcatctcattaaccccctttgaactctactgtcccccttattaaggactagaagtgcctgtcattttggaacatcttctcaccccatgcagtccctagagaagggagtgcggctgcaaattgctcataactgtgcagtcttggctgtaaaagcaagcagcgtcagaattcatgtgacttcagtcacacatcttaccgaaatcagcctcctctacgttccctggtgggtccacgggcttcaaagctttaacccccccccatctccttagaactgaaatgcagatagcactttacttttctcttctgtttgtttatttattttttgatgtcaagaaacgaaaatactgtttcactgtgacagcatctgcatctctgtattcgtgaatagatttatctctagattggcacctagcagggaaaattagctgtaagtgtttttccaaaacgctgaaatccgcaagtgaaagtggctagaaggttaatcttcctggtgaacatcagtggtggtgtatctgaagcggagtggtgatgttctttgggctgttcgccaactctaagagctgttgtgatcatgttcaatgtagagatgacaagtatgctaactagggagaggagggcacacctaggtaattctttccgactactgaggactatatttaactacaagatgctaattgcagcatagaaaatctattcagacatgactgatctagtcaaagatttatcagtgtatccaagtttggagatgtcagacctcatactagaagcactgatatttcgtctttcctaaaaggtgaattactaaaagagcaaacaaacaaaacgttgatatgaggttatctaacgatccttgcacggggatgttggaggaacagaactgcagctgttaagagaagttcccgtccctagctggctccgtgactgccactcaacacagtaacctgatggacacaatgtgggaaaaattttgagacacaagtcatgatatgcccttctggcagggtatttttgacttatgtatttttcccctagacttcagctctggtttcatgatcagcaaaagaacatttcctttgttttactttttattttcatttttctttaagtgtctggaacataagcagacatcaatataatttctttttttttcttttcattacttttttctttctttctttctttcttttttcttgagacaagaatgagctaagaatcaccaaacgcagagtcagggatggatacaaaattaagaaacatgaactataagaagagaaagacaaggaagctgcagatgccagcaagtcacagcaggccatcaaaggtctcctcgactctgtgtggatatggattaatcttattgttttcagctgcccactcacctggagattctgataactagtcctaaggagagaaggcagtgttttaggtcatctacttgatattagaaccacttagagtaaagagaggttcttcataaatgtcattttgtaagttggcaaacttatgcctcttttctttgagattgcttgactttaactgccccctaccaattcatattttcatgtagaatgaatatgtacttagactggtagtatggggaaattaattacatagactgtcaacactgtctgaaaacagaaggatagtattttatcttttatgtatttgagtcttcataattgcaatgagtgaatcttctggcagcagcaatactttccttatcagttcttttaggttaataatagcagtggggtgccagccaacccagaatgctctgacaccagctcatacaatatgtaaagcaaatcctttgcatctcaggggctccagatgctgtttgcacatctgcagcttgacatctctatgtttagctgaggtgtagcagtggtaaacagcttatgctcacacttgactccaggacctaacgtggactgtcttgaactttgtttcttggtagagagtgttttgaggtttaacagtcttagtttgctaccttagtgaattcagcagcaaagaaagcaaggaaaagggagtgcaaacttccatttccatagggatataggatgtcagagtggccaatgaagagactgatgttccttcaaagagatagacaagattacttctatagaatgaatccataaagtgctcctttgaatttattaggggagaataagggaacctccatctcctcctcagtttagttccagtcagtgggcaggcctttctctggctctttgctcaactcagccaaccagacccaacactctccagtgtgtttctatgcttttaagacccaagacacttaacacatgaatagttccttccttttcaaaaagacaaagctgacagctggaaagttagctactgagattctttaaaggaagccaggaagattatccagtaagttcaagaagaactctcttttgattctttaggtttgctagacttaaagttctttgggcttttggttctctagccctggcagtgaagataaaccaagtgtcctgcacttgaagttttgattactgcatcattgctacaacttagaaagaaatatcttaggctgatcctaacaatggtgatgggtcagaacatcagtctatggaatgaaatgcaaagtcttggatcttggcttgaagtaaatattatagagcaacagatgctttatgtgtccttcatgttgttccctaccacttacaaacaattgctctgggacctctgtgattacagaagaaaagctgattaaggttatgtgaactggataggaactttgaagtatgcaatagactaaataaacccactccatcatctataattgcacttgagactgatgcatgtgtgtgtgtatgtgcatgtatgtgcatgtatgtgcatgtgcatttatgcactggtagattttaagtgattaatcagggtatggaggccataacgattgattcataaaaaatagaaagctgtgcaatgaaaattggtcttggatttcagaaatgattgaaaagagaaggaaggaaggaaggaaggaaggaaggaaggaaggaaggaaggaaggaaggaaagaagggaggaagatggaaacaatcaaggaaagaagatggaaatgttaggaaagaaggaaaaaggcaaaggaggacacttggacatgctaactttcttggcaaagctacacagaccatgactgagtttgcaagctccaaaacctctagtccctaatgaaactcgaattttaatgacatctggaaactgtataaacaggatatttatctctaacaggcaggacataatgagaacaagcattgtcatactggaatgcatttatgagacagactagggttaaaaggcagagacgaagacattgataacagtattagttttgtagctgaacaaacaggatagatcatttctcagagcctcagttttctattagctaaaacatgaaaaggtaatcataaagatttctttgataagtgaataagagatgtataagtatagttagcaaaacctttcatatgaaattacattgatgttgacagctcacaaagatttttttcatccatcttaatctagtttaaggaagagaaaacccaacctaattcaggatatgtttagaattagacagagggctgaagtagaaaatataacttgagagttaggtaaaactgaagaaacgaaggtatgtttctgtcagtttgccttagagtttattcagaccctctcagagaagcctaagtgccttccagatgctgttgtactcatgttcaaaatttcaaaatgatactgattgtaagtagaatcatgtgcatccatccatatgtggttgcagaaacaattcgaatgtcagcaagtggtgttaacattgctttttctctactggctctttttgttcacagacaatgaaaggatatctgtttattagttcactatctggcaggtactggtacgatggttgattctgtgagaagtgcattaggtctctcttcatttctctaggctgccactccagcattttgacatggcatgctgcagtctgctggactgctccttagaattttgacttgatagttaaacagaattaagattcctcttccagcatctgacccatatggagctatgtcattgtgtatgacctttatttagttcaagaacatattgctaaagatgtaaaaagccttgttcctattaatgtagctagctgagctgtcagcgatgaggccaattctgctttgctaactctgcacggctggtaccacttgacccaggtatttctgttctgcctagtcagcctttctctgaacatgaagagagctgggttttgcccttcagtgtgtgggctctaacagtctgataatgaatggaagggctgtgccttatgatttgcatggaagcaataccaaatccaaactcacagcaatttaaattctttttataaaatccaggtctagggcagcaaaagaggaagaaaggataacaatgagtcacagtaacacacccatacacatactgcatctttaagtgccccaatctagggacaggtctctgcactgaactagaaaatcccccccccgccccaatcatacacagcacttcatgtagagagcacacataaagctgatgcaataagttacaattatcacaaataatcactggtcatatgccgtgtgccagacaagggaaatcatgtatgccctctgttaaaaagtagtgagtttgggggttggatcaacagatcagcagagcatactatttgctgctttttcacagaccggtgtttgatttccatcacttatatgttggctcataattgttagtaactccagttacagagggtgtgatgccctcttctgacctcctcaggcagtaggcacatggtacaaatacatgcatataggtacacatatatgcatataggcaaaacattcatacacataaactaaagataaatgaatttttaaaaaattagtgagataactatttttctcctaaataaacaaaaagagattaaattttgccatacacacacacacacacacacacacgatatcgattttgtttctaatagacctgaaaatttttctctttggaccagttaattcctgatactgtatgccattaatgttatatttttatggtacttagaagattctagagctttaggcaggtgtctgattcttttattattgcccaagacttgttggaatggttggccttagatggtacattatacttcagttgaaagtgtgaaagcaatgttgaaatgcataggcagtattactatgtgtaccaactttttagtgatggaactttgggcaggttgattttatatctgtacttcagtaccttgatttgcagagctattgtaaaataactaataaaacagtacttatgaagcacagagaagagagattgggtaaaatccatgctcagtaaatgtgattccattaaaatactaatggaattaaaatactaatggacccttatttacttataatcaccgctaatattctaagatattgtgatatcttagaattttagtttacataactatcttggtactttgaaggaaaaatagttaagtgataggaatgaataaaatactggatatttttgtctttctgagacatgatacaaaggataggaagaaaattctgattctagaatacaattaccagcttggctataaaaaggagggaaaaaaatcacattttataaacttttgcatttgtgtatatgtgtgtactcctgtctgtatggatgcacaagcatgagtacctgtataaattcgaacagccttgagtctcactcctcaggggcagttcaactttttttattcaaagtctttctatgtcctgatgctcaccaagtactcaagactgactggccagaaaacctcagattctctcctttatgccttccccaaaatgggtaacagtgtgtaccaccagacctcctaacattctaataggttttatagaatgagttcagaactgcttgccttacagggcaagcactttatcctaccaactgagccatcttcttaactgtagaagttttctagttaaaagacaagaggcagcagccttcttttgattcactgtgccaaagaaaacaataaaaattcatttttattctctcatccctgaaaaaaaaatacattttgagtataatgaaagtactctattacatttccatgtcattgttttaattatacctttatatgtatgtaggaatgtatatgtgtgagataacttagtcttttaatgctttgtagtaaactatccagtggtgacaagtttcactcatttatacaagactctatatgtatgtatgtatgtatgtatgtatgtatgtatcattctatctctctatcatcttttttctttctatctttctatcattcgatctatcactatcatctttttatctatcacctatcatctataatttttccttttacccatctttctatcatctatctttatatctatctatctatctatctatctatctatctatctatctatctttatatctatctatttttgaggtcaaagaagcaaaaattttcaaagcatatttatcaacattcccttaaaataaatccagtgaccatacattttgagaatctagtagacaatcaatatagaagatatgattaacttaaaaaatataacatcaatacaacatttgaataaaagaaaaatacaaaataaatattttgaataaacattctgaaaaaagaaaatcttgtgctgcaatcctagtagcaggcaaatggattttctgatttattttgcatggtgaagttataggtcatgatcataagcaatctggattaaagctttagagaatagcagaacccagtgcttccttatataaaggaaaagcatgtttaaatggtttgttcagatctttcatctaccaaagaatcctgactatcaggaagtattgagcatcatgttcataaatctattttgatcccagtgccaaaagtaacatatgaaaatacgtttgaaatgttttcatgtccacctggctaccagaattttcctgaaataaggtctgtccagcatagtaatagagaatctcttcatattttcctctgatggatgctacctccatcattcttttaaatcttctttgtcttcttgttctgcctggcctcccttccttattatgtctttgtatctctaagtctgacctcaatttttatcactgttatcagcctatctacattcaattcttctactccaacaagagtctgcaactttgttccacatatctgggatgttatctgggatgatatcaatttaatgggcaaccatttatttaaaaataatatatatatataaaaaatcaagttcttaaatctaaattccataactgaattctatctcagtaatcttagttgagatcattttacataagtaaatcaacactttcaatgagcatttttaatgagaatagtctattctccttttgtgatcattttgttagtgctatttactctgtacttgtttgttgaaaacatatatgtagtttaatgctatgcatatagaataccaaatataggcaatataaatgatccactaaaatatattgttttaattttgccattacattgataaaggggaagctaacatgatagccaaagtaagtcaaagctttgtagaagcaaaacggaggcattcatactgggagatgtttaagtacagaaggacagcttagcattagcactaaagagctcagtggtggagaaagtgaagaaatgtttggaattctgtggagtgctttaaaagagagagtccttaatataagcacagtgaatctgtaacaatgttgtgatagtacagatatactaagagcttcacagtcattcaaagagggacatctttattctggagacagtaacagaaaaactaagattcattccacttgtgattttcctaaagaaatgtatcattacaaactgaaaacatctgtgtcattgcatctggccacacagtccaggtgtccaactctttcgatttgaaactttagttggcctgaaacaaagtttagcactattatctattttccactctatttctcttttgaatttactgaagccattttggataacttttttttttttctgaattgatgggatttttttctgcataaaattatttttcaaaacttcctctttttaatgttgtaaaatgagaaattacaaataaaggtatacacagccacccatctagtttatcttctcttcctgcttacaatttgcttctgtccttttgtttctggaaagggttctagtaccttgaactgatggtctgttaactatcatcatctgatgtcatgttcttgaggaaagcatacctagacatctatggcttagaatggaaaacctttactaaagttggaatatctggttgaaggctagtccctgacctttctgtctttggcatgacactttggcttgtgttttgaaaaatataaggggtcctttctctgcttcaagaaattacaagtttcttttccaattaagctggaggcatggcaattgaacaatgagaaacttgcaaattagttaaattctttacatggtgacctgatgtttgaggtagggtctggattcaaggtcaacatctaggaaaaacagaggaaaagctttttgaaaagagggaagtatctattgtataataccacttacttgacaaactgaatgaggtttatttctattatcaaatacttctttttttttctccctgctgatctttatttttttttttcattttcttattaagtattttcctcaattacatttccaatgctatcccaaaagtcccccacaccccccccccactcccctacccacccattcccattttttggccctggcgttaccctgtactggggcatataaagtttgcctgaccaatgggcctctctttccagtgatggcctactaggccatcttttgatacatatgcagctagagtcaagagctctggggtactggttagttcataatgttgttccaccaatagggttgcagatctctttagctccttggatactttctctagctcctccattgggggccctgtgatccatccaatagttgactgtgagcatccacttctgtgtttgctaggccccagcctagtctcacaagggacagctatatcacggtccttgcaacaaaggcttgctagtgtatgcaatggtgtcatcgtttggaggctaattatgggatggatccctggatatggcagtctctagatggtccatccttttgtctcagctccaaactttgtctctgtaactccttccatgggtgattgtttccaattctaagaaggagcaaagtgtccacactttggtcttcgttcttcttcagtttcatgtgttttgaatcttgtaccttatatctcgctatactaagtttctgggctaatatccacttatcagtgagtgcatttcatttgagttcttttgtgattgacttacctcactcaggatgatgcccttcaggtccaaccatttgcctaggaatttcataaattcattccttttaatagctgagtagtactccattgtgtaaatgtaccacattttttgtatccattcctctgttgaggggcatctgggttctttccagcttctggctattataaataaggctgctatgaacatagtggagcatgtgtccttcttaccggttgggacatcttctggatatatgcccaggagaggtattgcgggatcctccggtagtactatgtccaattttctgaggaaccgccagactgatttccagagtggttgtacaagcctgcactcccaccaacaatggaggagtgttcctctttctccacatccttgccagcatctgctgtcacctgaatttttgatcttagccattctgactggtgtgagatggaatctcagggttgttttgatttgcgtttctctgatgactaaggatgttgaacattttttcaggtgtttctcagccatttggtattcctcgggtgagaattctttgttcagctctgagccccatcttttaagggggttatttgattttctggagtccaccctcttgagttctttatatatattggcaaatacttcttaatcagatataatttttgttcattgctgtcagtgttagtggaaatgctaatactgagtttcagaaacaggaagagtgtagaattaatttcttcctgtgtgcatgcccaggactagtttcaggtagattttccattataattaacctctttataatgcttggtaaattgtacatccagaatcagcagaaacctctctctacctctgttattttcctcatatctcctaccaagaacaccatccatgtgtcccacttactcagaagaccagttttcctcctggctatcaggatttcttacactttcagttttgtgctcagcttccactttccaaaattagctcaagttcactttctcataaggaggaatcattgaacctttcccaacctgcctcagagattataggcttgcatctgtacactcctggttttaagaacatcatagggcagcactgacttgcctggaaacagctcgcaaggctggtccctcagcttcttcagtgaggatgtaacactgattttctttccttcaagactgcaaagtcttccaagtctgcagacccatgccaagcgtttgacaactgcctcgctttgctgtcagtagatataaacattcttcagaagagacattgttttatctgccaaatcaacaactggcatatattctgtatttctcatttatctacaacttcatatttacttccaaatttattcattttggaaaaatacagagtatatatttttaaaaattgaaagatagagatagtgaatgaatgtcaaaaatctttgagcatgtgtctggataaattatatacctgtagtaggaaatatatttaaacagttcctttctaggtcatttaaaatatttaacaatttccttcttaaggaagtatgtgtgtgcttgtgtgtttcaatatatctttaaacagtgcataaactctaaagttctatgcaaatgatgattttgttatgttgtattctgaaattatttttgaattatatcacatatatttgtgtagcccagtaaaacaaacagctgattaaggggcaatcatttcccctattttaaatcacaaatattatggataattatgaaatagagctccagaaacagatgtgtgcagcagcgttgtttgtgtgtctggtgaggtacagtagaacctggctaaattacactaatgagctagcgacccattacaaatcatcacatttgcccaattaatgttggagcaacatagagaaaaaagatttttaagcaagtcagctgatagaaagggaagaaaaatcctaaaataaatttaaaagacatgagccatgtacacacatatatacacatgcagtatgatgcagtgtcaagttttaatttacccttttagggttgttctagtatcacaaggatgtcagaaagtactgccttgagggatcctgtctgttattgtgctctcacaattgctttgtttatagtctcaggaagccctagttcttttgttgttgctgttgttgttgttgttgttgttggtggtggtggtagcttttgagacaggttttctctgtgtagtcttcactcttctgtaacttgcagtgtagccttgacctcatagagattcacatacttctgtctccagagtactgagatgaaaggtgtgtgccactgccagtcaggaagaactactcttatctcacatttacttgagaaactttgtacacaaacgagaagagaggggggagagagagagagagagagagagagagagagagagagagagagagagagagagagagagaggaggggtaattatttttctaattccttgaggttataaaatttctttatttttttggaaatcaaaggacaatagtgcatttctgataattatgttatgtatggatttttttcaaacattgagtattaataaccatttggagcaggattttagacgatttccttcttatctcaaaggtggttttagtctctcagacatagactacatagacaagacattaattttatactttaggttaaaattatacctcccaaattatatctagatcttctacaaaattaatgtatagtttagtctttctgattttttcttcctttctcattgttattagattggttgcttgatcaacacaacaccattttcaccctttgctccatgatttcaaaatgtctttgcattttatttttaacctatataacctacttgttaacttgaaagcaaatgatccttctggaactgccatcttcttgccaaggatgtcgcatctgggttgtcttctagtttctagctttgttagactccatttgaaagttcttttatatatttgctaatgggcttatattgtactgtctacaactgcataatggaagatctaaagaacaaagtgcatcccccttcagtatttagtcactccttgctatgtaatagattgactatgtatgtattttgaattgctcaataagtttgttgatctgaaagtcaaacaagaaatttattcttggcatcctttaatatcaagtacaaggcatgttatttgtaagaagtctgttttccttccttccttccttccttccttccttccttccttccttccttccttccttcctttttctcccttcctctccttctttctctttctttctttctttctttctttctttctttctttctttctttctttctttctttctttctttctttctttctttcttcatgtagttctcctatgtctcacaagagtatgaacttgcataagacaacttcagtgtactatggtctttcactgccagatctagcataatctctatctgacatacaaatcaatgaattctttttcctaaaaatgtcatgaatagacaatctcagacacaaaatcattgattatgaagcattcatcataggaatgaagagattgtgtagctttcaaaggggcatggaggagagaactgtcaaaaggctggcagactgtgactgtatgaatttgcctttatttggcctttaacctccccagtgaatgcccacagacagttctgcactgtgggtgagtgcatgtaagactacatgtctgtgagaagatagaaagaaaaaaattacaagataacattgcaaacaataaatgagaattttaggtggcctaaaccatacagctaattcatgtgagccttatattttccaataagtttgactcttaacatttttattacattggaagaggtaaaggaagggtagagtgtgttgtcccgtactatcaaatctaagctttaatgattgtccattgctagagactaatctggaatggtatttgtgtcagcggtgaactgtatttagaaacagtattgcagtccccagcccagtggaaggattggagaggattgaatatttggggtcagaaggaagagattacttggcaaggttttcagatgcacagttacttttatctgtacacatttcatcaggtttggggatttatcagattcattgggttgtcaaatagaaagacattataggaaaggtattcgcgattggatcttccccctcttaaacactgcacattgaaaccacatttcaaagatactaattcttggaagtcttaaagtaagcgaagtgttttctactccacttatgggaaacactggaagagatcgtttggagctgggttgtgctgtgcatgggaaagtgatttgaagaagtagaattttatagcctgcatcccactggctgagcttcagaagtagaagctagtgttataaaataggctcgccatgatgattatggccacatataagatttctgtacatcaggcagtgaaagctggtgactcatttctgtaaaagactttctgctgttttaaaccaagttctgagaccttattgctgctatgagactttgtcgagttgaatttctttacccaagctgcttctccatggttgggtgtatgtctttgtgaagaagttctgacaatttaaaattgagataagctgcataacaactaaaaggataaaaataacttcattgccaggaatggggctgattaaacacggaagattagtcggggttggtttcagccttttagctgcctttcaagggtcaaagtcagggtctggcatggatgaagaagggttcaaatgacgtttgtggagcttctgacttctttaataacaattttcttccctggttcttttttggtttaacagtaaattctagtttgtttgtttgtttgcttgttttcttgaatgatttaaaagcaataggaattgcagaccggctaaaagaactataataaaaagaaatatacaatggggcctccctgtcttggcttctttaaaattatgtatatatatatcttacacaattgccatgaaaaagcatctaatatacttcaaaaatcaaaggcaaccatatatccaaggaataagatcttgttggatcacataggcctgtaaaatgtctcatactaatttttctttctttcaaatagtatgcaaagaataatatttgaagaattttggaagtcttctgtgaaacatctaggtttactttgatccaattcaatgtttttcaaatttattcaactatggaagactctttcatggaacatcagttaagacttagcaaattaatactgccccatgaaagctatgtgtcaacagcgacttaaataacagttgtactgtggatgggaatgtgcttattagtcaacactcacatgattcatacacgagtgtatacaaatgaaatcttgctttatgacagaagtcccttaggaatacaggtttggggtatttactcatcttaaatgaggcatggaaagcatgcaactggatgctttaatcacagttgaattacaaattcaagttgggaaaccaacctcttatcatactcttagaggtctgctcactctctttaatagtggaatatgtgaccatttgtccctggtaacagcattcacattttcataaaatatgattgtagggacatgttgatattgttcaaatacacatgttgtattgcatgtacaacaaccagtatgcaaacatattatattagatcaaaacattttttagttcgatatgctctccattacttttagtaattgacattgtactaaggggcagcatcaatagctgagtctgaatgaacacccaagaacacaaactctgtagacttttaatttccagagtcttttcagacaccagcagctctccgggaagaccaggtagcctctgcattgctgagggtggctgagaggatccagtggtttatagaatgcaggatggctatgaaatgcattcagatactgcttcttttcctaacacctcagcctcaaaacaaaacaaaacaaaacaaagagcaggcaagaatagaaagagtattcttagctgagccagcatgatatgaatgctgcattagcagctgctcactgagccgcagctgagcagatctgcagtcttcaagctgccccacatccttcctttaataccggctgcagaaattcccttgtgtcctttccaagcaggaagtctaacttcctcaggatgaatgatctttccaatctccttagaataggaactatcaggacatagatggtaagaatgcctttcggcacatcagaataataatgaagtcttatatttatataactcatgatcatggactcctcccctatgttttatatatatatatattacttaaaatcagaggtggtcttacataaatgtaggaggcagtgaagatctttagtctcattgatttcctttgaaagtaaaatcctcagagaagtctattaaactgacttccattccttatgcattttctttattcccaacagcagtgggaattctgctttcttcaggtaagacgtctcccacaatggaggagattgatgagatattctgtaacaataacttgtgagtcttgatatgctcactgagcaatctgggatgagagaagaggcttgtgaatgtacatttataggataagagcaaagacagttacaggcccatgggttattattgaataaccacggtggacctatgataacccatgcagagaaactctcttaaaggccattcatcagccatttatttagtacattcaatggcaagggtaacacatggaatgggtctgcttttaaatgaggatctaaacatgtagaattatgggatactaagaacaattaaaaaaatacataaaagccagatttacaattcaaattatttttcttctttcaaaatcagtggttttaatctaaacctatcatggaaattacagagaaatcagagtgacagcatttcaagagagaaaaaaggttacacatgattgagggtaacatttccccctaaaacttgtacttcaaattattaaataataaatggatatagaattcataattaaataatttctattaagtaatttcagggtataatttcccaaattcactgattttcataacatttactttttaccttttgttactctctaaacatttaccttaatgctgtcattgagaaattgtggcattatttggtcatatcaggatatttattattggtattattaaagtatcgggatatatattggagagttggagatacaatataaccatcccttcaaccacttatataacatcctaagaaacagctgatatgtcccactacttatgaaatatccaggttgagcaggacacagaatactacgatgatttgaagtacatcatgcagatagtaaggtttatttatttacccctcctccatcacaaagactaaaaaggtctccgtactggatttgctttcggtattttggaatgagattgcaatgaagcaaaaggatttaattttaaacctcatctgcataacattggccatggggacagcattttataagggatggagaggagtgtatctgtttatgtgcctgtgtttgggtggggataggacgagtgcatgtgtgtcttcagtgtgtatttccccccacattttctttgcttttatctttatttctttgtctattttgtaaactgtttttaaaattgttttaggttagctcccaagccatgtgttttcttggaactttgatgtaacagtcccattttattaattaaaagtcaggtcatgtctgatgttgctacagctctacgagagtagcacccctgttataatgccattctttttcttttcttacaaaaacataggacctagctatttccctccttaagcctagccccccccctcccgagtaactgagactataagtgtattatacttctatgccctgcttaaaagaaaaatgttgctttaaatattccatcaagtgtttctctggctcactcctgtcatcagtttcattccacagtgtgaataagtgtcctgattggtttttgtcaatttgacacacatttacacattccctggaagagggaagtttaactgagaaaatgcctccataagactggactgtagtcaagtctgcagggcattttcttcattaatatttgatgtggaattgtctagccatttgtatgtcttgccacccctgggcaggtggtcctgagttgtataagaaaacaaactgaacaagctatgaggagcaagttagcaagcagcattcctttatagcctatgcttttgttcctgatcccaggtttctgccctgagttccgtagctgatgcacctgtagcatgagacaatctccacaagttgctttggtcaatgtgttctatcacaatagaaaaaagacctggtagagcaatacactatgtcaccttttaagaaaatgttattggaaaccatatactaaagtttttatgcttaatgttgtcatttatgaaatgagaaattttgatgaggagtcctcttggcaatggtcagcacttcagatcaccttcttttcagtagatcaaaaatactgaaaacatacctaatataacttcttaacatttttaaaaaaaatattacttttttttcctcccaaagtttgccaactgcctgaacagaagaatcataccacttaatcaaaatagatcatttcaacccatcttttctcactgggtaccacttcatggactagagcctctgtggaaaggactcttctgtattattttttgtataatgttctcctgaagctgaccactagatgtctctgtgatcacatgctaggccaaatcagacacatgggtcaaccacttcagtgaagatgaacctcactgcaannnnnnnnnnnnnnnnnnnnnnnnnnnnnnnnnnnnnnnnnnnnnnnnnnnnnnnnnnnnnnnnnnnnnnnnnnnnnnnnnnnnnnnnnnnnnnnnnnnnnnnnnnnnnnnnnnnnnnnnnnnnnnnnnnnnnnnnnnnnnnnnnnnnnnnnnnnnnnnnnnnnnnnnnnnnnnnnnnagagagagagagagagagagagagagagagagagagagagaaatagaaacaatctatcagaatatgcacatgaaaataagagatgatgcttagtgttcaaaatgaggcatggtaactatgggtagaattgttctaagatctctggacacaacttccccaatgtcccttggtttggggacctgttgttcttcatagtcctttctcacattttcattcttttatttatttttttctattttctctctcaaatgtaactttacctcagtaaagaccaagagcctatattggaaactgtttgtttttaacttaatgcttacaaagcagcctacatcacaagttattaggaaatgcttttgttggaatgttaccggatgagagaacaatccacttgcacagtagaaatgtaaaaaggaaggttaagataaattgttattaaagtacaaatcaattaatatgatttcatacttaaaattgttatgaatggagatatttaaattttaaaaataattttgtttgctcttaacattattaagcaatgcctatgtgtatgacaatacattttcagatcagccaaggaaagcatgagaatagatccttaaactctgacagtatccaccagcttctatctttgctttatatgaatcatacatatggtagtagtcatgtaaaaacaagttgagaggaaagactaagtaaatgttcttaatgatttgctctcacatgaaaatcataatttttagaaaatagtgctgtactcagactatctgtaaacattttggaattaagtcataattatattctttctacaaagagtaaaacaaaattgaactcaatttccatccatctcaaatggttacagactcccaatggataagaggatacaacactggctgtttgttgtgatttttaacagtcacttccagtgtatttggtcagtagttcagtagatcatgctgatctccttaaactgaggtgcagttatttcctgagggcaagaacaatagctgtaaggaattggcactcagctgtctgaatttactttttagccacttgaatgtgacaaaaaaatgcctacaaaggtttactagctcatgttatttccgagaatcaaagaagaaacagagaagcatggcattttcaattctgagtggtttaaaaatgggtgataataactaacaattacagatcttactatgagttgtaaattataagggactgtatctttaaaacaatagcttgcatttattaagtgccttttatataccagctgctgttctttgacctttgcaataaataaatcatttactcttcacatccaaccttattaccgttgctgggatctgaggcacagaaaggttaaaaaacttgttagtatctagaaaatcagacttgaacccagagagtttagcttggcgctccctggatcactagcttcttaggaaatttttgaatggtactggggttgctttaattggtgtgattgattctccctcactgcatatttcctaaacatcttcattggccagtttagccagagtaacagtaccattactttaagcctccctttttcttccatcgaaactctcaagaggccttttgatttcttaggtctgttgccttcatgatgttaggtaaatcagaagagttttttagttgcaacattttatttcttattattcatgtttaaccatgacaaatagtgcaagaactcataaggacatttacagatctcctcatggctatttcccttctatgcttaagttccctcttctattactttcattcattgcctagaaaactgcttctttctttctgtcaaatatacaaaaaatacttaagtatctttatataatttataaataaattccacaaacccagacactattgtggataccaagaagtgcatgctgaaaggagcctggtatggctgtctcctgagaggccctgccagagccttacaaacacagaggcatgtgttagcagccaaccattggactgtgcatggggtccctaatagaggagttagagaagggactgaaggagttgaaggggtttgcaacacctcaatgagggaacaccctcatagaagcagggggagggaggatgtgaaagggtgttctgggaggtagggaaacagggaaaggtgataacatttggaatgtaaacaaagaaaatatccaattacaaacaaagcaaaacatgtgaggtacatattttcaagtcaagtctgaattatttatttagtgagacaatttttatttgcatctttttttcatttctgtgatgtaatttcatttttatagccaaatatgtgcatgtgtatatgtataagtatgtgtgtgtatgtgtatacatgtagtacaatatataatatgtatgtatgtatgtatgtatgtatgtatgtatgtatgtatgcatgtatgtatttcctctctatacctcatttgagaggcttattaaaactttctgcttcctcattactgtacctacactctcgttacatttctcaagtgccgcagcgatgccctgaacttgggctacaggataacagctcaagcacatattcattgttcctacaaatcagagactcatcaggatttctaggctttgcttcaagctgtactgatgccaggtaacttcacaaaacctttgtcccagagtcctatctgatcatgcaattttctatttgcatacattttcctcttctacttggaccacccaattacatgaaagatgttcatggcttaataaagtaaaagatgtactgaacatcagtggtgtccctataagaccgcctggttctgtgcgcattgttcacattcttccctgcggtactcagtgctgcatgaatttcagctttatgggctgtgaggattatttaattccttaggcttcagtataggcttcagcaagtatgtgataatgtatacactatatttggcactctagtactatatttcatatacagtttcctattgtgttatgaatagttatgaaagaggaaaagaaagagagaaaaaaagtaaaacacaccattgccctgctctgctatgccatttgtcttgatgaaggaatgttattatctaccattatgacaaaactaacacttgaacgtatgcaaaagggcactcaagttgtccattgaattttcatggaatttcaaggtaatttctcttctaataacagcagtggtagcaagagaagcagcacaaccgccactaccataatcatcctcacagtcaccatcatcatcctgactaccacaacattccctatcactaccaccattatcatcatcaacactaccaatgccatcagcaccaaaaatcaccattactatgaccatcaccatcatcatcaccaccatcactaccattagcattatggtcatcactatcattacctccagcacaatcgctaccatcagagtaaccatcaacatccaccttattgtcatcaccactaccaacactaccatcattatcttcatcaatatcactatcaaaaccaccaagaataaaacagtagactttacctattctaaagacacannnnnnnnnnnnnnnnnnnngtgtctactcttgttaaaaatttactcaaaagtgatgaacaatacacttatctacatggtatggaatactcagttagccttaactattctttccttacctagcacatgcaggttactagctgaatcttcaagttggccttaaaaatataagttagaaaaatgcaagtcaatgaaacaaacaaacaatcaaaatacttaaacgagacttgaaatggcatcaccactcctggaaatttcctacaaatatctctgcaatcatgtcttagttactcttctttactttcccacaactttgtgtatgattttgggttgcatgtcattgacaaatagtacacttatctacaaggttatagaagagtcagggttaaacataactattcttttcttatggttgtgtgctctttccaaggcttgccagatgtatcattgtcttagggcttcacagaagctatcaccccgtcactcagacttttagatgaaatctctcttctttgcatgagctaactcagctttccaatcagcagtagataatctgttatgtgacttccttgaacaatttatcattttgttatttgatcacattgttcaattactgtctatggaccatggagtctagttctcataggaaaaacaaaacaaaacaaaacaaaacaaaacaaaacaaaacaaaacaaaacaaaacaaaaactctgctttctcttactcatcactgttacactgtcctaaaggtttgtgaggcattaggcaaatactctgcatcaataaataaactaactaacaagtaaaactaccaaaattgaaaatgtgatttctgatttcaaattaatataaaagacaaatgaatgagcactggagaacaacctaccttcagttccttccttttctgtgtctgtttgatttctatagtcagagggcaatgtggttctcttcttgaactattcattactctagtttgcattaataaaacaattgaagtagaattaagattctttctttgtctgatgggtttgttgttgtttcatttggtttgtttgatttgctatggatcaaatccagggtcatactaatgttttgggaccgagttccactcctaatccaaagacccaaacctagatttaaagaggactcagggcttccttttctgtcttggagtcacaggtagcaatgcttataaaagattgttattgaaaagacttaaatgttttgttatcatgaagggaaaggccaggaagataggcaacatatttagatatttcctcatgtctcacgacgaaatcatcataaggtcctcatcatataaattactccagactatatgatatggaataaataattaacaagttgtaacttaactaagggagtcttgtaaagttattgctttaagccactaaatttcagtacagtttgtttctcagcaagagatggctgaaatatacagatgatataaccacaatggatcagaaagaagttaggacaataggcactaagcctgcttgtttctggtggaaaataactcttgcctagttacaaagcctttgataacttaccactcactcccaaagcagccaaggaagctcataagtcaattaggtattgctgtccattcactgccgtagccctataatataagattactttgagggctatttgcatagtgatgcttcagcatagcattaaactaggagaagaaattcctggtaaaacgtgtcaacactgaggaaacagcagaggtagtacttgccgatctaatttgagctggaatgctaactcacagaaatagtccaacaaatcttcaaaggatgggccattagaaactaaacggtatgaagtaagctgaggaataggaagtagaatggaaatcagcattgtgatgcaacagacatctggaaaaaaaaaaaaaccaaacaggatgcgctgactatattttacctaatgctgtcatgggggaacaatacccatgtctgtccatgaaggaagatccaaaccatctcccttgttctgtacatgtcttctaatatgtagttctatttatgtgaattctgaagctactcagctatcaaagactttctttgtgaacttttgaaggatggactattgaccagttttctttttgttgtaaacatgtatctgaaacaaagaaatgcaaagaaaagtgtttatctgagcttgaggttcttgaagatgtagctgatcatggtgacaggaaaggaagggcatctggtcacactttatccatagttaagaagcagagaccaaacaggaggtgaagtggttccattttaaggcctgtccttccctcattacctatgtctcccagtgaggttcctctacttcctaaagatcccagaacctttctaagcagtgccattcacttgggaccaggtgagcacatgagattttggaggatatttgacatccaaacatcagcagacagtattttaattcaaaagtttaaaaaaccttcatactccaaaggctctaaaagatggtcaattgggatctctacccaacagagcccctttctattaccttctccccacaccttgtatcttatatcatgctatttcttttttttctctttttttattaggtattttcctcatttacatttccaatgctatcccaaaagtcccccatacccaaccccccaaccccctacccacccactccccctttttggctctggcgttcccctgtactggggcatataaagtttgcaagtccacagggcctctctttccagtgatggctgactaggccatcttttgatacatatgcagctagaatcttctttgtgtgaacacatcacctccccttagagttcaatactctcctttataaagctggaggagtaccctattgtcagcaggctacactgtaaattgaataaatagtattttttaaacactatttaataaatagtggggagaataagtattgttattatttgaagggtaatttactacttttgattcacttgtaatcactttatcaaagtgtcattcagtaagaactatttgatgcatcaaatgtcttataggccttttaaaagagattttcattatcaaaattgttaagaggatttaccaaatagaacagtttggcatccaaagtgtttccagccatataagcattagaccatacacaagcacattgggaactagcaaagaccagaatgtgagtttatccctgcatatgtctgcaataatcctttaccaaatatgtacaacaaagagttctacgtagtaacatggtcaaatattattttagccttcccttgaacctttgtatctctgtggcaattttagtcacctcattcttcgatttcaaaaaacagagttttatatcatattgaaagactggtgggatatagattgtttcttgagtgatgctatttctagttaccctctacttagagcagagtgactgaatagttagcttccatgacctgatatagtcaatgagaggaaagggcttttgatttttaaaaaatatactataacactatattccaaaagctaagtttaatattactcatgggttaaactattcatgggttaaagtatatagttcctaccacccacactttagctactggtttaaacatatcaattttatttatttattttttttgtttattttatttatgtttgttcaaacatactccaggaatatttgaacactttgtggagaagcgtggcgccagatgtaatctgtttaaagggcattttcaggtagctggtacctttcctcagggttttatggtgattaaaggaaaaacctcatcataaaaacaactgcttatcccttacctatgtaaatttaacaccctcaaaacccaaattggtatccactctcagccactccactagctttattttgttttgaatcccctccgtgcatgggtcttttttgaaacatgccacagactgtgagacattatgagctctggcctcaatctcaaccccagctttttagtactagtaaattctctagttttaattgcatttaaaaaatcattattcctttctgccatttatcttattaaatactttcttttcaggacaaatctctcagctgaaattcctttatataatacaggaaattttgttcttcaaacagacaaaatatggggatagagagtttcttttgactattgtaaggccatgaggaagtggcttcataatgtgaataatgctacaccacacttcttgaattctccctttcctaagactctttgttgttcagttgtatcttacttctcagtgttggagcagcatctggataagcttctaggcatgtatttcctcttcacttatctgaagttcctgcctttatttctttctttgtccacctatcattcataatatttccagaataatgtttctcagtcatcattaatttttttgccatttttataatcaaaccattagttgacacccccatggtccacaatgaccagctttcaaattttgctttatagatacaacctaacaactgttatctgttttaatgctatcagatataattttggttggagtaaaaaattatgaatagaaaaatgttgaagaaaacagtgaataaaattcaagttttatgacacaaacacaagcactcctagcattttaccccttgcccctactctgacatggtagctggccatctacagcccatgtttcctatctccattacacctgattgcttgtgaacatccaaactattcctttacctaccttgatatttctgcttctttgaaaatcctacagaatacctttaaaaatatttttcattgtgcaaagtccatcctaggtatttctacttgacatctcatcatttggtattgctactctggattacaattacaaagagatacgtttttcacaatacaactactcaacactacatctacttttccacaccattctgctattcacggctctctaaaagagagagttgagccttaaagaggttattttattgttgcacacacacacacatcttttattcactataaagtatagcatcaaaaagaatcctgctattttaaactctacttaagtgagtgtaatagtgttgaaaccaacaagatagcaaggaatggagagcacggttcttaattcccattgctagcaacaagcttccatgtgagctatgttatctaccacttgtgaatagtttatcttatttgaccatttttttgtcatctataaaagtaggaaattcctttcaggaaagctgctgctggtggtgtgtgtgtgtgtgtgtgtgtgtgtgtgtgtgtgtgtcacagaattatttttatattgcatattttgaataagatagtttaactgtgattagcagaaaattcattaaaaaattccctagaaatggtaagttatcttgtgtaagcagatgctcaggagtgagtagacctcactgtctaatgaatgggccagtcaacacctccatcaaaggttccactttctagtcttcttgtcatagacttttcaggattttgagaatcaacctagaacccatgacctgcagatggttgtagtaatctgaagatgagctttgcacaaagcttttcgtatactttttccttggaaaatatgggagttttaattagatgatattttagcagatttccctaaatgaccacagaaaactactacacctcaaggcctttcctatacccatctgtgtaaatagaaaatgatcatcaaagatgattggggttggttatgattgctgtgcctgtttagcagtttgttggctctttagaagacagtagccatagttagttggaacacagccagtatcttgtcaatgcaaaagcatcagagtacaaccaatagagcaagtatccaagacctcttctatcagccttatttttttcttctctcaacacccaactttaaagaataaaacattctactttctcaagaaggcagtttcttttatattgacccttcatcttcagccactgttggtatcattatatattcttcagtattctggtgagggcacacaatttgcaatgcttgtttcatgagcaatatgtaggaagagacatgaggggcaagtgggtcagttttcagcctcactctgctcctgtcctacagccccaaactccttcctgcttaattaaaactgcaggaggacagcaccactgcaagtcagttcagcttcctggatcgacaatgatgctgattccacattcataattaattctccccagtgttaagaatggagcttgggctgattaaggattcttggtggattattgcagatgtctgatttgctaaaacaacagcagccatgcggtgtcttcttgatctacataaacttgagatgcagaagacgagaagaggcattttatgtttccctccagaaatctcacttgacatttagcaagggacatttgttagaatgtcagtttgataaaactgtttgcaagagtcactcagaatttgctactgagctataacaattgttaagagccgtaattactccaggcaggtttaaggaacaaaatattattagaatacttgggccaaacaccccaagcaagtaaccatgcttcttctgtcttccagttgaattagtgtctccctgacacactccaaatattttggcagcaaagttacccacagtcaagaaggcaagtaggagtcagtaatgatcaccaagggatgagcagaaaggtctgctgacatagaactgcatatagaaaacaaatttggggagtgaattccgcatgtcatatcatgataaccaataattatatcgcaaataataatggcaatcaattggattttgtttactatgagcctctataatgttatataagcttcttatagcaacatttacttcactattccaatcctatcagggagggcaaataattatcaccacttacacattaggacatggataggcatattaccaaccatcatagtatggctaggccttcaacatattcattttataacccattcatagctgctgtatttcattaccttcttagtgtctgatgcttgtatactgtattgtataaattgcatggtacaagctattcactaatgtatggaaatgtagcaataagctaaaacttgttgacaaatctttaacacagtatagggcatgcattattatgagtaaaaactattctggttaattattaccatgatctcacacttggataggtatacctatcaacttcttaagtgcaaatggaggaagatacataccaactgaaaagctaaaaataagtagaatcaagaaatactacaaaagcctggatttgaaaagggaaatttttgataaaagaaacaacactgactaagataagatgtgtgctccattttggagaaagccaattaggataaatgtttattattgttaagtctttgttcattcattcatccaatcatagaaaaagtgttttgaaaatcaattttcagtggaggcatttatacagcactgtttgtagaaaggggaaaaatgacactcttctttttaaaggcaacattggaggggaaaagaaagccatggaattacacaggttagaataccatggtactctgagaggcaagatctattacttccttgcaagacttcttttgaactgcctcataggcttgttgtgcctctatttgttgcatagtatctgggagacagctatgttgcccccaaatcacttcggagaaatgtagacattcaaaaagggactcctgtggagtacttgaaagatttcaaggaaacttgtctcattattatttcaaggttctattattccaaaatgcctcctcaaatgctatcaaaaggctgctcttcagactttcagaactgctctgcacataaagtgagatgttcctggaaaagaacagcagtttctccttgccacatactactgtccctcacatcctttgtggcaacagaatgcctttttgggcttgtttttttctagttgagtcaagcaaggacacaacttagagtgtcaaaaggtggaggggctttgtatatgagtgtggaatgactgaggaggtacaggcttataattctagtgtttgtaattactgtgagattgacaccagccttggctatggagtgagatcctatcttggaaaatgaaaaatgatttatatatatatatatatacagagagagagagagagagagagagagagagagaagagggagtgttggaaatagaatcagcaaaggcaggcagggttaagtaatatgctagaggcaatactagagttggaatggaaatggagatgcaggaattggatattcagaaaacctttaacctatattacagactctaagctaaccatgagccacagaaccaccttgttatcctttctctgtattaatttataagtgttttaaatgagaaaagcgtatatagttagaagttagaagtcagtgtgatggtcacacagtttccttgtataatatttaaaagtctataacaagcatattttaaaaatattgacaaggtttacatctcatcctttctgggttgtgtcacgtgtttatgctcggctgtttcttgctgtcataaagtcagtataaacatagtattttaccttttcagcccggtctcttagagcctttcgttattagctacctttccagctgtactagtctcctcccactccttctcctcttccccttcttcttcctcttctttttatttatttcttcgtccaaatcctgaacaaaggaagcattttgataatggcctggagagatggcattgttgattaaagtgtgcatttaactaatttcccagcacctttgtacaaaactgtgtgtaactccagttgatctgacactctcttcttgtctctgctggcactgtattcacatgtaacccatacacacacagacacatagacacacacacacacatttacaaactaaataaatcttgaaatctcccaatcagacacaatttggatgaataaatatatttcagaatatacatatatatttccttgttacacatttttagcttaccttaaagccaggactgattcatattatttcttttgaactaagtgtaaaacaatattggccatattaaatgcttagatatacattaagtttttaactaaagatttataaaatgaatgaatatatactacaaattctctaacttacacagatatttaaaatttatgtagtcttttacttgtaaacactttaactaatttaattttagactctgtattatgtctttaatttatttcatatagtttaatttttctaatcaccctatagggtagaatttattgtttccacttaacatatgagaaactaagcactatgaaacaatctagttagattcatataatattaagccaaaaaaacaggtattttttaaatccccaaatacctaaagatatgtttgtttttttcatagttggagttatatcttaatcacaattatcttatatctgtataagtttacactaatatttagatcacttctttagtcatagagtatgtatccagtcttacatattattatttctttcaatgactgtgttatagaaaagttaatcatgagccttctatttaatgttacagggtaatgtataaaactccgtgattccatgtgtgtacatgtatgtattcatagacatttgcatgttttcaaatgttgttgcttttgttatatctgatagtcaaattctacccatatttccaaagaaattaatgccttttgactgggaaaaactgatcagattttagatatgcatttcaaaatcttgtaattcttagaaagtcttgttctctaatatagtttcatcaaaattccaggtggaataatatttgtgttcatgtgtgtatacaagtgtgtgtattttgtgtttgtgtgtgtgtgtgtgtgtgtgtgtgtatgtgagagagagagagagagagagagagagagagagagagagagagagagagagagagagagttggtcatagatcactaaatatcatctattgttatcttcctgtctgtctgtctatttatctatctatctatctatcacctatctattatatatctcatacctatctatcatctatctatctatctatctatctatctatctatctatctatcatctatcctatcataaatcctctctcagactctagctcataaatttagtaaggctagctaatcaaagaaatgccatgagtctcctgactcctccttcccagcactgtgattagaggcatacactatagtagtttttcatatggttattgaagatctgaactctggtcctcaagattgcatagcaagcacagtactaactgcaccatctcctgagatcaacattagatttttaagattagattgtgagggaaatgcagataagtctaattagaaatgtacatttagattaggtaggtaattttctaatagagtataagacatatagtccagcaagtatatgaggaacttgctgaaaatgatatatgtgataaaacaactacagaccaaaagggaaagatatgcattagggtatagcaatatatacagcgttcagaaagaggacatgtggggcacttattttatgcatataaaacattcatattgaagactgacttgcctagggttatttgttagtacagttagataatttgggattcaaggagctgaatgatggtgaaacccaaacaggattttccatttgatagaagctgaaatcttttggagtttgcttattaatttcaaattctggtcctgagagactgtgctcatttgctgatttgtagatttgcatgattaccagtcacaactgagaaaataagcgaagagctatgccaaactctcacatagtggatttcagtaagaaatttgctccttcaagatacttccatcgttacaaggatagaacacatgtcacatgcaaaatgtaagcacctctctgttcctaggtctaggcttgtacaggagacagtcctttttgttttccaaaaaagggactttgactcaggctgaagccctgcattattcgctctgagttttaaggacaaaacttagatttttttttcataagccagtactggaaccttccatagaatcctgaagcataacccactgtttctgccttatattcttcatatggatattaggaatgtgacaatattccctgtgatggccatagtggtaaaaacagtcaaatattgacagtatttcattatttttttctaatagctgtgctctttaattaccatgtcctgctagatagacatttactcagcttcagtgacctatttctattttaattcactgttgttattctctaaggaaatgacaatatgccttccatctggaattacgagtccttcctttatttttgttgcaaaaagctgtgcacttgggaacctcttaagtttggctcatcactccaatgttgtgctgcaggaaatggaaaacatcagaggctaaagcatcttaaatatcaacagggatgtgcgagttgtttttttaaagaaaaggaatgttaactatcagaaaagtgctacaatatatttaggtaggtattaataggaataaatacttacatatttttttaaacttatattttttaaacattcttttttagagagtcactgcattttcacaatgaggtagtgtggcttctaacctggagactattgttttactactgtgagaacttgaagggaagggaagtctttgcatgttgcacaattagcaccacatgcaagtagtaaattttttaaatttttttccattttttattagatatttagctcattaacatttccaatgctattccaaaagtcccccatacccacccccccactccccctttttggacctggtgttcccctgtactggggcatataaagtttgcaagtccaatgggcctctctttgcagtgatggccgactaggccatcttttgatacatatgcagctagagacaagagctccggggtactgcttagttcatattgttgttccacctatagggttgcagttccctttcgttccttgggtgctttctctagttcctccattgggggccctgtggtccattcaatagctgactgtgagcatccacttctgtgtttgctaggccctggcatagtctcacaagagacagctatatctgggtcctttcagcaaaatcttgctagtgtatgcaatggtgtcagcgtttggaagctgatcatgggatggatctccggatatggcaatcactagatggtccatcctttcgtcacacttccaaattttgtctctgtaactccttccatgggtgttttgtttcctattctaagaaggggcaaagtgtccacactttggtcttcattctcttgagtttaatgtgtttagcaaattgtatcttatatcttgggtatcctaagtttctgggctaatatccacttatcagtgagtacatattgtgagagttcctttgtgattgggttacctcactcaggatgatgccctccaggtccatccatttgcctaggaatttcataaattcattctttttaatagctgagtagtactccattgtgtaaatgtaccacattttctgtatccattcctctgttgaggggcatctggtttcttgttttctttgatgctcttgtgcttgatttctgttatatcaaaaggaagggaggtcagtgatggggaaagcagaagagttaagctaactcagcatggggttttataaaattgctcttttgacccatgcttctttgttttgtctttatgattactacaagtaatcaggataaataaaatgtgttagtcagaccagtttcgtaagctttactgtcagggaagaatactaaaagcaacctaattcttggtaaaaaaggtggctaaggtatttagggcaggcagaattatttgtgctaatccttctgtttatttttcttcttcttgaagactttgtagaatcctccccccacccaaagacacatgtatcaaactaaactaaaaccaagccaaacaaccaaacaacagaattactcatttctctttaaggggtatggcctttcatgatcaaagaaataatacaacgtaacagcagtacggaaagttcttcaagggttgtggcctgtggtatattatccatgatccaatggacagcttcacacccaggcatagacaggcagctctgattaaactaagggttagaagttttttgttgttgttgttgttgttttttttgttgttgttgttggtttgtttgtttgtttggtttggtttggtttttagaaggaaaggatatgaagttggtgaggcttttctagaagaggttaggggtgacaaccttggtagagatcctcaaaatacttcatacacatgaattatattctcaacaaattgataaatttcaaataatagcactaagaatatagtgaattcccctgcttgctccccattgaagaccacagagcttagatgatgaaaatcagagacccagaatcatgcaagcaatgtagaatggagaagaaaagggttgggggcatgaggttctctggtaacagttactgcatttctgatgggacagtttagacaaatgactttcctcatccttactctcaagcactaagggaccttgaggacactttctttaactttccttcctcctagaacattagtagttcaactgaaggtcatgtaagtgctcattgagacatatattatgagtttgtaaacactcataaagtcaaagaattacagaacttcggggaatttagagatcactctgaaggttttcttgacattgaacgattacaagatctcataaaaaaattccaacatctaaaacaaattaaattgttgctgatctcctgagcctgaagggagactcaaagcttttactcatcctcttctgggatgccctgtgccctcagaatatacttagaaaaccatggttctaatccaaacagctgagttcacactgaagaggctcaatccataaatagatagaatcattttctcaagctttgcagtgaattagtggttaaacttcaataaggacgtaaatcctcttccttctaacttagaacactttataattcatcacagtctttgctcagtcattctgggactcttctttgtaaatcaggttgctatgaagagagaaaccagagaccattgctcatttattcactcatggaactaatcatctttgctttagctgatatcatctccctataactgtctgacactcacagaatgtatttgccttcataaggtttatgaaaggcatggcagaagaaaagaatcagcatgcaggaagttgacatttgatttaaattccttaaatgcttcaagcctcacttctttctgcattaagtctcgctgattatttgtgggcaacttgttttcctgtgaacaacttctgcatagaaatcatggctaaagatgcatccccagcagatgcactgtacatggaaaaaagactgtgtctaaataggctactttttcaagttttaattggtctaattacttcatgtttgtaaagtgttttgaagaggaaaggtgctatattagtgtttcttgttattattttagttcccttggcagcacttactagaatcttcaattgcctttcttgaagtaacctaataatcaaattgccagtgaagatttattctttctttctcatcttctttctttctttttcccccaggaacattgtttaaacaggaggaaaactgggagactaatgacatataatgtaatcttttctttggttaactctgttcccaacatctttccagaattaaggaaggatgggatttatactccatcagtacttccagaataaatgttctaaagggttgaaccctagctatctcagagaccattgcctgccagtataatgatcttctgtggaccttttttaaagactaaggcttcttccagaacctgcagatagtaagacaatcttgtagacaagctgaaaaagcaaggtcttctccctttcagctcagttcttcctatgggggatggaagaggatgtacatacagacatctgcactggttagaaatttgcaaagattcactatcctagggagctgtcttctttcttgtaatgctggacttttatttcttcatatataaaatgaagcttgatttcttcccatatcatctgtctgcttttacataaaaagtttgattttcatgaggatattttcaaatcctttttctcatagccaatgtttttgctgtgccttttcaggttcttggtatctcattgcaagccttgaaataatggctcaaacagactaaaaattagcaaaagaagcaatggtctacacagaaatgtatcgactaccacctctagctaactgagaaagaaaaagagaggggataagagggagggagagggaggaagacggaaagagatgggaggagggagagggaggagcaagaggaaagggactggaagaggagggagaaggaagagatcatttctaaagttcactcatagaaagcagtttgttttcatgcaaattcaacccaagccagttcaggccagatcatttcatctcgcttcattgcagcaaatgtttgaggacaagtctgacttgaaatgcactgtgtcagaggactgcaaagaggaataaagtggttccaacagttatagcaggtaaatgtgcaacgtgttgttggaaaatctcaagttgccaatagatgactagatttactttaagaaaaggaatgtgggtacaatgtgtgtgcaggtgaggaaggatggcaaggctattgcttggaaagcaatatatatatatatatatatatatatatatatatatcccaaataaagtgtagttccacggtgctaaaccatttcctatacatataggactcattctttcccccctttttaattttcatagtttattttcccatacaaaatattatgaattcaatttcccttccctcttctgctcctacttcttccccactttctttcccatggatctctactccccctttgtctcttattagagaagaacagtgttctaggagaaagcaacaaaacataataaaatataataaggtaaaacaaaaagtatatcaaagttggtcaacacaagacaaatgaaaaataaaagagcctcaagagtaggctcaagagtagaagaaccactgatatgacatattctggagtcccatagaagtattaaaatgaaagctatagcatatatacaaagaacagtgtattctagttcctcttacacttacatctgtcatctttcttctatccccattccttccctccccctgctcctggttcttcatataaactccactactgcattcacttctttttgctttgctttctcttgagtttagtcagaactgtctactggagtcagatgggctccttctccagtgagcacacaactaaagacaaagcctctcccttcactagaattgtttagaagcattggtcctaaatgaggacccatgacttacagctgacagtacaagtcttgtgagggcctttgctggcagatggtgttgacctggaatggtgatggaaatggctttgccatgccatatagatagatctcaaccattagttctatcttcaagcatttacattttcttccctcatgttctgtaatgtttcttgagccttaaatgatgtaatacaagagtctgattttggacgagccaccatgaattcctgaatagccaccttttggttgaaaatagcagcatctctgattatagctgtgacagaggacctctcaccccctttgtttgtatatttattattacccatccagtctttatgatctaaaaacatatttcccagacttgtacaggcaaatcatctaattgccattagatattcacatagtgcttttcggagaatacatgattagaagattaattactgtctaggtcttttacttattcaaagattgaaactgatgatgacattaagatctggagaattggatcagtggttaagagcactgttcattctttcaaaagactaaggtctaattctctgtacccaaatggtgggttataaacatctgtagtttcaggactaatagttctgacattctctctgtttcattcaggttctgaactcatatggaatacagacatacattcaggaaaaatacaaatataaaatgtgttttaaaaaaacatacagattttacaattatataaaagtttaacatagattatcaattttattacataaacaacaaaactaaatcactctaataagtattatttcttaaaatttgaaataacaataatataatctatctagtattttctattcattaacctacaagaaaacatggtcctaatatttaatgattcctttaagactgaacatatgtccaaccagctctcagaacacaaattcccttccacactggcaaagtaagagtgtgagctcactagatcagaaatacctcctgccactttgtgtaagaagaagacaggtgtataaggagcaaatagggactgtatgtgtaacacagtgaatgttatagagtatgtagccagaagagaatccctgtgaaaacattccaattttcaaattataaaacatcatgttatagaaaaatgcactcgtgagtacgtcttctgattgcatcattgaggctgtttacttaaactgtgcaattgcttctagttcaataattagagaacaatgacctgtattttaaagttatacaatcacaaaagaactcaaataatatgtactcactgataagtggatattagcccagaaacttattgtagtgagatataaggtacaatttgcaaaacacatgaaactgaagaagaacgaagaccaaagtatggacactttgccccttcttagaattggaaacaatcacccatggaaggagttacagagacgaagtttgtagctgagacaaaaggatggaccatcaagagactgccatatccagggatccatcccataattagcctccaaacgatgacaccattgcatacactagcaagcttttgttgcaaggaccatgatatagctgtctcttgtgagactaggctggggcctagcaaacacagaagtggatgctcacagtcaactattggatggatcacagggcccccaatggaggagctagagaaagtatccaaggagctaaagagatctgcaaccctgtaggtgcaacattatgaactaaccagtaccccggagctcttgactctagctgcatatgtatcaaatgatggcctagtcgaccatcactggaaagagaggcccactggacaggcaaactttatatgccccagtacagggtaacgccagggccaaaaaatgggaatgggtgggtaggggagggggggagggtgtgggagacttttgggatagcattggaaatgtaattgaggaaaatacgtaataaaaaaataaagtcatacaaaagggagcagcatggcttgtcacaggctctagataattttttgctgttgttgtttcacagtggatcaccatcataagtgtcagactcacttctcattgacacatgtcttataaatgatgaagaaatgtgttaattatatagaacattgggaaagtcaagcaattctgaaatgctttctttctttcacaagattgttaagaataatgcttttcttcgggtcctcacctttggcttcctatgtgaaccccattaaagcccaacagttaaaaactattagatagtcttcctgcacctgagcttttgacacatggagaataaatgaagcatctccaaggctctgttttgcccagtgcaagatggttatttcaattgttaatatctggatatgtcactttagtaattaaataagaaaaacagaatgaaagaatgcatgtagtgtctttggcctttcattaagtaagcactgaacatgaattcttctcttatttatcacacaccgtaaattattctcttttcttagagctgtcctaacatgttaatgatttttacttggtgaggcttaggttttgcaaatatcttgcaatttaattggtagctgagatgtttcactcactttaaaggaaaatataatgtcccagaaatgtcattaactagaaaagcagtgtattttgttccacctttaaaaaggattctgagcttctgagctaatatctatttatcagtgagtgcatatcatgtgtgtttctttgtgatcgggttacctcacttaggatgatatccttcagacccatccatcacttaggatgatatcatccagatccatccatttgtctaagaattttgtaaattcattgttttaatagctgcataatattctattgtgtaaatgtgccacattttctgtatccattcctctgttgagagacatctgggttctttccagcttctggttattataaataagcctgctatgaacgtagtggagaatgtgtccttattaccagttggagaatcttctgggtatatgcccaggagtggtatttctggatcttctggtagaactatgtccaattttctgaggaatcaccaagctgatttatagagtgattgtaccagcttgcagtcacaccagcaatggaggagtgttcctctttctccacatcctcgccagcatctgctctcacctgaatttttgagcttagtcattctgactggtgagaggtggaatctcagggttattttgatttgtatttccctgatgattaagaatattgaacattttttggtgcttctcagccatttggcattcctcagttgagaattcttcgtttaactctgtaccccattttaaaaataggtttgtttggttttctggagtcaaaatactatggaagaagttacagagacaaagttcggagcagagactgaaggaacgaccatccagagactgccccacttgaggatccatcccataaacaaccaccacacccagatactatggcagatgccaacaagagcctgctgacaggagcctgatatagctatctcctgaggagctctgctaggaaaatacagaagtggatgctcacaatcatccactggacagagcacaaggtccccaatgaaggagctagagaaagcacccatggagctgaaagggtctgaagccccataggaggaacatcaatatgaactaatgaattctcccagagctccttgacactaaaccaccaatcaaagaaaacacatggtggaacgtgtggctctggctgtatatgtagcagagaatggcctagtcggtcatcaatgggaggagaggcccttggtcctgtgaagactctataccccagtattgggaaatggcagaaccaggaatgggagtgggtgggttggggagcaggggattggggaggtgataggggattttcagagagggaactaggtaaggggataacatttgaaatgtaaataaagaaaatatctaataaaataaaataaagaaaagcagtataaactccccagtgtaaagagatggtttcttgagttctcctagatgtgacaaagcacaaacaaaaaaagagaaggccagagtgtcgtcgtcctgaccaaacaagactgtggttttagctttgagatgctgaaaatggaatgacacatttaccagattgtcagtggagtgtttgcctgatggcatgctgcattgccatcattactttgaaatgatctggaattgcattttcgcctgggtttcatcagaggtattttgatgtggatcactcagtggttgaatccttacttatttacttaccaattgtgcagggaactgagtcactcactttgtgagacccagtttcttcatccaacgaaaggatctctctctgagaattgctatgacaaccaaatggtgcaatttacctataaaacttttggcaggtttatgttgaaataatacagacattattatttttaatttgtaacatgataaattgcctgtgcccttccaatgaaggtgtaaaggaccatgacagcttggtaactcccctcagatcttttcttggtagagtgctctgatctctttttataagggaaactgcagacaggctagttagatgcaaccaatcagctgtataaaaaacatttcctcaaaacatttacccacagtccaagcagagcaacaagatggaaggactatagataatggagaagtgggtaatgatgtctaacatgacagacagggtagctacactattaacttgttaatactcaacaagtttatatgctttttaacccagtgaaaatgtgactccctgctttcatcagttttagccattattgtaactcaccctatattgtatgatggaaatgcgttggaatctagaaatagaagtgggtttcaattctaattctgttattaaataaaagttgttacttttctgatcctatgcaaattcagcaagttctctgattttcttggctcttgactgtaaaaattaaatatgctttgctgataataatattagttgaaccaacaatcagagaagcataggaattaatgtcatgtctgccttgtagagggccagagtgtgcattacttttctcatgtccttggctcactggcaacttcctgtcaagacttaccagagattatcctcaccttgattcagacatgtattttgggccctgaaactgaacttaaacaatgctcagaagattcagctcctgtctcttatcaaccctgggccaacctgtggtgatgtcatccttgccagtcttaatcataatccttgccagatattttaaacagggaattactgaaacactataagcatagttttggtacttagcctagctgtagcttcacacaggtgtctcccataaaaataatatatgcccaacattttctcagtatggaagattttgtaatttagaaaaggtgactttgtaaagcagacctggatgcacccctatgtctgcagtattaaatcagcatgactctttaggttggaagtgttctattatctatagttttcctctttgtttgcaaactaataattactggtgtgagaataaaagcggcttctcaggctggtgagatgactcagcagttaagagcaatgactgctcttccaaaggtcctgagtccaaatctcagcaaccacatggtggctcacaaccatccataacaagatctgatgctctcttctggagtgtctgaagacagctacagtgtacttatatataataaataaataaatcttaaagcaagcaagcaaacaaacaaacaaacaaacaaacaaaagaaaagctgggcagtggtggcccatgcctttaatcccagcacttgggaggcagaggcaggcagatttctgagttcaaggccagcctggtctacagagtgagttccaggaaaaagcagcttccctcttgattggtagtgttaagaactaccacttttatacatgcatgaccacacacacacacacatcctttatccttactgaccagttttcttaataagtgttaggaaatctgaatatgtaaacaaacaaacaaataaaaaaaatttccactaccaagtgtggatcttccctctttccatcaggaaatatctttctttcttcaatctgtattttacatattaccaaaactttaggatttgagttagccatcactcacaatcaactgtggattaataaaaatgatgttttctcttacttaagaggtttgagttttattgtaaagaccaaagatgttgaatcacggacctttaaatcaagatatatgtaatgtctatacctggtatctgaactgttttctgtagttaaatatgcatgtgtatgtatgtgtgtggcgggggaggggcaggaggtacaaaacaggtactttgggaactagtgaaagacagcttgattggattctagcaaacacgcatgacctgagataactgcattcctgtactctgaaggaaggttagaaggagaagggtgcgttgtcaagtgatagaaaagaaaacgatttcagcatacagtaacttcctcaggaataggtctttctgtccgctttgctcctttgcaacgctgtagtaataactactgtaagatgcttgagaaagagaattgcaagtaaatgaagaaaatgactctagatgtaattcataatcccctctcgacaagagtgcatatgtgtagttttacatgtaataaatgtgtatttgtgcatgtggaagcataaggtttggtatactttccagtagctctcaactttattatttcagaaagtggctctcctagatttcattaagctgaactgggtagctaacaagcactagaaccctcctgtcttcttgcctccatgcagccaggattatatatgtgcagactgcagcaaatgtcttttcaagtggaaattgggcatgtgaactcacggccttatgactgcctggaagtaactaacctactaaagagcatcattgcctcatttttcctattctcagacatttgcaaaggcagaggcatagtaagtgccaaagaaatataaactattttcactagaagacacacagcctttgtacagacgagacttatgctcagtagaagataaacagctatacctctaagtcacttctacattttttaatcaactgtttgaattactttgatacttttgatttgtttatgaattgtgtaaacttttctttttgaacagccaagcagaggtggtagatgttaacttagtaagctagaggatatttatatttcaattgttattatttatagagtttatacattttgattcttattctttaatggttttttcttccacaacagagacaagaagctttctgaaaaaatttttcttgaaagtatgttggaagcattcatcttttcatttgtatgttttattgaaacttcacaaagcagtgataatttattttaatactattgtacttagtacttaatacttattgtattagtattattttaatagtaatgatataaataaataaaagtaaatttttatttatttatatcattattttcatatcaaatgttgtcccaacatctagtacccctttatcagagtttctctccctgttttcctccctttgcctcagagagggcagcccccacctggtcctccaactctggtgcatcaagtcattgcatgattttgtgcttcctctcccactgaggccagatgtagcatccctccactacatatgtgtcaggggcctcagacttagcccctttggtagctcagtctctgtgagctcccatgagtcctccttagctaacatgtcttttgttactaattggtgttctgaaacttctgagaatccttgaccaaatcccacttgacaaatggatcatttttgtcttaaaggctatctccagacggggtgcagaccaacacagtcgccatcatcatgactatttaaaacaatacccttgtaactgtggtggtgtaggtcctcattgaatccaacacaggaagaagtatatgtacatgtattttgcagcagaacatcccatgttatacacatcctgaaggttatccaaaaatgtctcacaaactgccgagaaccacattagagagattcaggccagttccactgataaaataattagtcacaactgaaaggtactaagattatgtgacagcttattagaaagtaagcctgacctttatagatctctactccatttagtgcggttaataggcaagagcttttttcttgggtaactgtagggaatctcataatgagttgttcaacttgaagggatgtcatgacagagaaaggttgacattaatcaatcagaagccaaggtaatgacagagtaggttgctttcaactttcaagatgtcagatattgaaattaatgaccataccctgttggtgtcaccaaaacatatcttctgatacctctgacaatttacctctcaactgtgttttattgatcatttccagccctatcttggcttctactcttgatgcagagttattgcctcatgtctgtgtttgtatgggtgggtgtcggtgtgggtttatataagcttacatacacacctgttgacaaatgcattcatgtgtgtatatatgattcttgcacttgagggaaaaaaacactatgtgtcattagttagtcctatttctctggcaaatatcgatttatttagaagtaaactaatgaatgagagggtaaaatggaaacaaacagtaaacaacagtggtgagtgctcaaaggactagggcaaggatgaagacaaaaatgaaccatagtaaaatgtgctaatgtccataatgtagagatacaataactggccttggcataatcatcctcaagaaagggccaagtctgtgttgacatccaaagccagtcttgaacataaattaactttgtgtctcaagtaagtttcttactttatttgctttaagtctatatttcttatattcaaaagcagtttgataatactcacagtgatgttgtttaggtataatgagtaagggtccagaaatggagctcaatagcagcttcagagcatctgtgtagccctggctgccctggaactcactctgtagaccaggcttgcctcgaactcagaaatccgcctgcctctgcctgccaagtgctgggattaaaggtgtgcgccaccaccgcccggctgagaaccaagtttcaattcccagcacacacatggaaaatcacagctatctgtaactcaaggtccagtggatccaggtccttcacatgacaaacacataggccaaacaccagatgtacataagaataaataaatacaattttctaaattgtgtataggtttttatgttaatgcttcaattctcttaggtctacacttctaagtgaaattcacagatcatacagtcattcaacacttaacgttgtgtgggacgacaaaactacttttaaatgcagctgtaccacttcacattttgagtgctggagataaactttaagatcaagacatgaaatggggtgggggtggggcagagagacagcttagctgcttagagtagattctgcacttgcagaggaccaaagtctgatgcccaggacctacttactacacagcggttatgaggttctttagcttcaggggatctggggctctcctctggctccacataccctgcatgtacatagtgtccatatatacgtgaacactcatatacatgaactaacaatattaaaaacagaatgagacaaagacaaaagaacaaagatgaacattttctttcagaacaccattacatatttattatttataggattttaagtttttaatgtgtttttttttttctttttctttttttgcctcccagatgctgggattaaaggcgtgtgccaccaccgcctggctagagcatctgtctcttaaaacacaaatcacgtactgggtttcactttgaacattattattcatggtatttcctctatttgtgaattcctctttttcctcttcctatagcatctaaatcttactagcatttccaaccccatttttttatgaataagtataggatagctttcctccttttattccttaaatcacactgacacctataacatttagacacagatataatttataaaataattttaaaagtttattagtgatatatatatatatattatatatatatgaacatatattacttaacactatgctattactgaatactcagtgcacacaagtaaaccaaaatagatgcatttaatcaatagataggaatatcagactacacatacattaatttagatggattctgttcaaccatagaagtaaaaatccttaacatgccttcaactctgatttttttttaattttctttcttccctaggggtgttgcatttgttggtgtggagctgattctcagttaatggattataattgatcatggctttatagagtgtgcaagaatttttatctttgcttgatgacagttagccaattaaatgaatcattccttggatgagtaatgaaaggaactatttcctttgaatgttaaatccttccattttattatatagaacttattgtccataccgctgtcacatagtactgcaatctttttgtacctttatttatcctcttagaaacatgtttggacaatgttcctttcttttcattcataagtttttaatgtggtgtgctatttgatgatgtgaattgaattattggttgaatcatgaataaatgaaatagttctattcacaatgaaaaagtctcttagttttctagcagcagcatgcactgagttagaaaaaccaatgcattccctcaggaacaatgaaatgtatcagaaagtatatattctggtggtacaagtgagaaggctctctggttaagaatattttctgttcttgcagtagaccagagtttgattcccagattcccagaaccatgttgggtaccttacaaccacatgtaactctattttgagaggatttagagccctcttctagtctaccaagaaagtgacttgcttctgaacatacacatacagaagacacacacacacacacacacacacattcattcctaactctttgaagttcatataatagacactcaaaaaaaagaatgaaataaaaacgtgtaaagaaatgaatgaatgaatgaacgaattgacatattaaacaacatatttgctattccacagatagtaattagctcaatataattagacttaccagccacatattacttatttctatgaagaaatataaaatataaactctacatatctaacacttgtgttctcaatgattgtgctatagttctgctaatgtttactttgcctgaaaatctcctcaaagaaagtataaactccatgagcccaaaaaagccatgactttgcttcagtcctctttgtgaattatcagggataaagggacagaagagagtcactgaaaaaatggtagaatatactctaacatactataattatagtctgtcatagactctagcaatgagctgtgcatggttacataaaactttcacacttcactggtgtgaataaggagcaaatgtttaatcatgttcatcttaattttaagtgtgaagagccaagcgcacaaactgatactttatcaaacaacacaactagtagaaagaaattaatttttttctactagtgcacatggtagaacttgaagagtttcctctagaatttttctatatttgttacatctcaatagtttatttttttacctgtgattctctcaacatagtgcttcattttctcaaaacattaactgtcttcttgaatgaattctgaaccaaatattgacctgaatcttctaacatgactatatttcaattgtcctgaagcatttttctcttgatatgtaaaaagatttcccataacaccaggttctgcttggaggacagttaagtggtgatagaaaaaagttcttaaagcctgtacttttgactgaacagaattctttgaatggattttattgtaacaaatttatcaatgagaaggaaaacacagctgagaaagaaatatgtacctactggtggtttggatcagatagtttaagaaaagggtacttattaaatgttacaggttaacctcaacacattaaaatgtgctgtagaaaaacacccagtttactctaagtgaatctaatgttcagaaaaccacagaaagctgtgcatagctgtcctaagaattggcactatacagtcttatccataacaagagtgttctaaacattcttgcatcagttgttctctctctctctctctctctctctctctctctctctctatatatatatatatatatatatatatatatatatatatataaacttttcttttttattagatattttcttcatttacgtttaaaatgttatccccaaagtcccctaaaccctccccccaccctgctccccaagccacccactcccacttcctggccctggcattcccctatactggggcataagatcttcacaagaccaagggcctctcctcccattgatggtctactaggccatcctctgccacatatgcaactagatacatagttaaggggggggggtattggtttctttatattgttgatcctcctatagggttgcagacccccttagctccttgggtacttcctctagcttcttcattaggggtcctgtgtttcatccaatagatgactgtgagcatccacttttgtatttgccaggcactggcatagcctcacaagaggtagctatatcagggtccagtcagcaagatcttgctggaatgtgcaatagtgtctgggttcggtggttatatatgggatggatccccaggtggggcagtttctggatggtcctttatctgtctcagctccaaactttgtctctgtaactccttccatgggtatcttgctccacattctaagaagaaacaagtattcactcattggtcttccttcttcttgagttttatatgacactgtgggcctctccccacattgatggccaactagaccattttctgctacatatgcaactagagacacaagctctggggggtactggttagttcatattgttgttcctcctatagggttgcaggcccctttagctccttgggtactttctctagctccttcactgagggcctggtgttccatccaatagatgactgtgagcatccacttctgtatttgccaggccctggcatagcctcacatgttatagcgatatcagcatcctgtcaacaaaatcttgctggcatatgcaatagtgcctgcctttggtagttgtttatgggatggatcccatagtgggtgagtctctggatggtcctttcttccatctcagctctgaactttgtctctgtgactccttccatgggtattttgtcccccattctaagaaggaatggagtatccacactttggtattccttcttcttgagtttcatgtgttttgcgaattgtatcttgggtagtctaaggttctgggctaatatccactagtcagtgagtgtatatcatgtgtgttcttttgtgattgggttacctcactcaggatgatatcctctagatccatccgattgcctaagaatttcataaattcattgtttttaatagctgagtagtactccattgtgtaaatgtatcacactttctgtatccattcctctgttgagggaaatctgggttctttccagcttctgcttattataaataaggctgatatgaacatagtagagcatgtgtccttattataagttggaacatcttctgggtatatgcccaggagagcaattgctggatcttccagtaatactatgtacaattttatgaggaactgtcagactgatttccagagtggtggtatcagtttgcaattccaccagcaattgaggaatattcctctttcttcacatcctctgttacctgaaatttttatcttagcccttggccttgagaagattatatgccccagtacaggggaattcgagggccaggaagtgggagtgggtcggttggggagcagggcaaggggagtgtataggggacttttggagaggaaactaggaaagggaatagcatttgaaatgtaaatgaagaaaatatctaataaaaaaataaaatatctttcagaagtgttacatcctgatagccatacctccaacaaatatcctgacacccaagacagagagagagcaagagagagagagagagagagagagagagagagagagagagagagagagagagagagagagagaagagatttctgtatttgctactaaattacattgaggacaactggattcttcttcattgatcttccccagaatttgacttgtatgttagcttcgaattctcaatctgtccatgtaccagaatattacaaatctaatgaaaagaactcatcagtatttttttttttggttgtttttttctttcagcaacacaacccaataccattaaacaggatcactgtaattctgtgaactttgccacaaataacaaatctttagttgatgtactaaaaattagtcatcaagaatcagccatctgcttctctaatctcctaaagtgccatatcaaattggcagataccattggattttaaggaaaaaaatctgtagtgtgaaaaactgacattaaaggtttatgcccccttctcatggcccaataaagaatattaatggtaaagcatgcaaaggattaatagctcttccctgaaagaggcccagttatagcaatcttgagaaattctgcaggctaaaatatgagccttacagtacttccaaagcataaattatttgttttttcttctctgtgaaggagagcctgtcattccaaaggcaatttttctctttgatcctttgtactgtaatttcatgccctggttgggatgtgcctgcccacgtagagtatgttcgtcttgcaagtcttagccttgaaatccactcctctgcatcagccatccttctaaaataaacatactactaagaaaattggccttttccatttgatgtgctaaaatatattcagtatcatcatatgaaaaaacgagatgaaagcaaggcattgtgtgaattataaagtttatatctctgttctaaacatactgttcttttaatgttattttatgtggatgcctgtgtgtggtgtggttgtatcttcatgtgcatttaagtgaccatggaagcggaagagaccatcattttacctggacatatagttacaggttgttgagtgttactcaactttggtatggggaaatacctcttcaagatcccgggaagagcaataagaagtcttttttttttccattttttattgggtatttagctcatttatatttccaatgctataccaaaagtcccccatacccacccacccccactcccctgcccacccactccccctttttggccctggtgttcccctgtactggggcatataaagtttgcaagtccaatgggcctctctttccagtgatggccgactaggccatcttttgatatatatgcagctagagtcaagagctccggggtactggttagttcataatgttgttccacctatagggttgcagatccctttagctccttggctactttctctagctcctccattgggagccctgtgatccatccattagctgactgtgagcatcaacttctgtgtttgctaggccccagcatagtctcacaagagacagctacatctgggtcctttcaataaaatcttgctagtgtatgcaatggtgtcagcgtttggatgctgattatggggtggatccctggatatggcagtctctacatggtccatcctttcatctcagctccaaactttgtctctgtaactccttccatgggtgttttgttcccacttctaaggaggggcatagtgtccacacttcagtcttcattnnnnnnnnnnnnnnnnnnnngggcatagtgtccacacttcagtcttcattcttcttgagtttcatgtgtttagcaaattgtatcttatatcttgggtatcctaggtttggggctaatatccacttatcagtgagtacatattgcgtgagtttctttgtgaatgtgttacctcactcaggatgatgccctccaggtccatccatttggctaggaatttcataaattcattctttttaatagctgagtagtactccattgtgtagatataccacattttctgtatccattcctctgttgaggggcatctgggttctttccagcttctggctattataaataaggctgctatgaacatagtggagcatgtgtccttcttaccagttggggcatcttctggatatatgcccaggagaggtattgctggatcctccggtagtactatgttcaattttctgaggaaccaccagactgatttccagagtggttgtacaagcctgcaatcccaccaacaatggaggagtgttcctctttctccacatccacgccagcatctgctgtcacctgaatttttgatcttagccattctgactggtgtgaggtggaatctcagggttgttttgatttgcatttccctgatgattaaggatgttgaacattttttcaggtgtttctctgccatttggtattcctcaggtaagaattctttgttcagttctgagccccattttttaatggggttatttgattttctgaagtccaccttcttgagttctttatatatgttggatattagtcccctatctgatttaggataggtaatgatcccttcccaatctgttggtggtctttttgtcttactgacggtgtcttttgacttgcagaaactttggagtttcattaggtcccatttgtcaattctcgatcttacagtacaagccattgctgttctgttcaggaatttttcccctgtgcccatatcttcaaggcttttccccactttctcctctataagtttcagtgtctctggttttatgtgaagttacttgatccacttagatttgaccttagtacaaggagataagtatggatcgattcacattcttctacatgataacaaccagttgtgccagcaccaattgttgaaaatgctgtcttttttccactggatggttttagctccattgtcgaagatcaagtgaccataggtgtgtgggttcatttctgggtcttcaattctattccattggtctacttgtctgtctctataccagtaccatgcagtttttatcacaattgctctgtagtagagctttaggtcaggcatggtgattccaccagaggttcttttatccttgagaagactttttgctatcctagtttttttgttattccagatgaatttgcaaattgctccttctaattcattgaagaattgagttggaattttgatggggattgcattgaatctgtagattgcttttggcaagatagccatttttacaatgttgatcctgccaatccatgagcatgggagatctttccatcttctgagatcttctttaatttctttcttcagagatttgaagtttttatcatacagatctttcacttccttagttagagtcacaccaaggtattttatattatttgtgactattgagaagggtgttgtttccctaatttcattctcagcctgtttattctttgtatagagaaaggccattgacttgtttgagtttattttatgtccagctacttcaccgaagctgtttatcaggcttaggagttctctggtagaatttttagggtcacttatatatattatcatatcatctgcaaaaagtgatattttgacttcctcttttccaatttgtatccccttgatctccttttgttgtcgaattgctctggcgaatacttcaagtactatgttgaaaaggtagggagaaagtgggcagccttgtctagtccctgattttagtgggattgattccagcttctctccatttactttgatgttggctactggtttgctgtagattgcttttatcatgtttagttatgggccttgaattcctgatctttccaaaacttttatcatgaatgggtgttggatcttgtcaaatgctttttctgcatctaatgagatgatcatgtggtttttgtctttgagtttgtttatataatggattacattgatggattttcatatattaaaccatccctgcatccctggaataaaacctacttggtcaggatggatgattgctttaatatgttcttggattcggttagcgagaattttattgaggatttttgcatcgatatttataagagaaattggtctgaagttctctatctttgttgggtctttctgtggtttaggtatcagagtaatagtggcttcataaaatgagttgggtagagtaccttctacttctattttgtgaaatagtttgtgcagaactggaattagatctttgaaggtctgatagaactctgcactaaaccagtctggtcctggcctttttttggttgggagactattaataactacttctatttctttaggtgatatgggtctgtttagatggtcaacttgatcctgattcaaatttggtacctggtatctgtccagaaatttgtccatttcgtccaggttttccagttttgttgagtatagccttttgtagaaggatctgatggtgttttggatttcttcaggatctgttgttatgtctcccttttcatttctgattttgttaattaggattttgtccctgtgccctttagtgagtctagctaagggtttatctatcttgttgattttctcaaagaaccaactcctcgtttggttaattctttgaatagttcttcttgtttccacttggttgatttcacccctgagtttgattatttcctgccgtctactcctcttgggtgaatttgcttccttttttctagagcttttagatgtgttgtcaagctgctagtatgtgctctctcccgtttcttcttggaggcactcagagctatgagtttccctcttagaaatgctttcattgtgtcccataggtttgggtacgttgtggcttcattttcattaaactctaaaaagtctttaatttctttctttattccttccttgaccaaggtatcattgagaagagtgttgttcagtttccacgtgaatgttggctttccgttatttatgttgttattgaaaataagtcttaggccatggtggtctgataggatacatgggacaatttcaatatttttgtatcttttgaggcctgctttgtgaccaattatatggtcaattttggataaggtcccgtgaggtgctgagaagaaggtatatccttttgttttaggataaaatgttctgtagatatctgtcaggtccatttgtttcataacttctgttagttttactgtgtccctgtttagtttctgtttccatgtccattggtgaaagtggtgtgttgaagtctcccactattattgtgtgaggtgcaacgtgtgctttgagctttactaaggtgtctttaatgaatgtggctgcccttgcatttggagcgtagatattcagaattgtgagttcctcttggaggattttacctttgatgagtatgaagtgtccctccttgtcttttttgataactttgggttggaagtcgattttatgcgatattaaaatggctactccagcttgtttcttcagacaatttgcttggaaaattgttttccagcctttcactctgaggtcgtgtctgtctttttccctgagatgggtttcctgtaagcagcagaatgttgggtcctgtttgtgtagccagtctgttagtctgtgtatttttattggggagttgagaccattgatattaagagatattaaggaaaagtaattgttgcttcctgttatttttgttgttaaagttggcattctgttcttgtggctgtcttcttttaggtttgttgagggattatcttcttgttttttctagggcgtggttcccgtccttgtattgtttttttttctgttattatcctttgaagggctggattcgtggagagataatgggtgaattttgttttgtcgtggaatactttattttctccatctatggtaattgagagtttggctgggtatagtagcctgggctggaatttgtgttctcttagtatctgtataacatctgtccaggctcttctggctttcatagtctctggtgaaaaatctggtgtaattctgataggcttgcctttatatgttacttgacctttttcccttactgcttttagtattctatctttatttagtgcatttgatgttctgattattatgtgtcgggaggaatttcttttctggtccagtctatttggagttctgtaggcttcttgtatgttcatgggcatctctttctttagatttgggaagttttcttcaataattttgttgaagatgtttgctggtcctttgagttgaaaatcttcattctcatccactcctattatgcataggtttggttttctcattgtgtcctggatttcctggatgttttgagttaggatctttttgcattttccattttctttgattgttgtgccaatgttctctatggaatcttctgcacctgagattctctcttccatctcttattctgttgctgatgctggcatctatggttccagatttctttcctagggtttctatctccagcgttgcctcactttgggttttctttattgtgtctacttccctttttaggtctagtatagttttgttcatttctatcacctgtttcgatgtgttttcctgtttttctataaggacttctacctgtttggttgtgttttcctgtatttctttaaggacttgtaactctttagcactgttctcctgtatttccttatgtgagttattaaattccttctttatgtcctctaccatcatcatgagaaatgcttttaaatccaggtctaccttttcaggtgtgttaggatgtcctggactgggtgaagtgggagtgctgggttctgatgatggtgagtggtcttggttcctgttagtaggattcttatgtttacctttcgccatctggcaatctctggagttagttgttatagttgtctttgtttagagattgttcctctgttgcttttgttaccctctatcagcagacgtgggagactagctctctcctctgagtttcagtggtcagagcagtctctgcaggcaagctctcctctttcagggaaggtgcacagttatctggtgtttggacctcctcctggctgaagatgaaggcccaaaacaggatctttcccagaagctgtgttactttggccaggaaggtgaccagttgtctgcagccgaaggtggcgccacctcagaagctctctggctctcgccttcccagaaatggctggcctctctattccacaccgtcacctgtgccacctgccctcagaggagtcctggagccaaggacaagaagtcttaatacctgaatcatttctctagttcctgaactataaaagttcctgtgtcgatgtcctcaagccatgagctgagtcttaacaatattaatatttattgatgaaagtaatttttatgccgggcagtggtggagcatgcctttaatcccagcacttgggcggcataggcaggcagatttctgagttcaaggttagcctggtctacaaagtgagttccaggacagccagggctacacagagaaatcctgcctcaaaatgaaaacaaaaaacaaaacaaaaaatgtaatttttttttattaataaaaagactcaaaccaatggcataaaacccttatctgtggtagatacatgttttcaaaaatttaggtccttttcttatttccttctagactactagagttcatatagtgcataatttatttttttaggcatgtgggtttgatttagaaatgttttaactgggttcttatccaataggaacaagtttgactgtagtcaagattagtgacaagatgctctttcgatagtaacaacctctatacaactgtctcaaatattgaatgtaaaacttaaccaatgtagattgggacatcagtgtttaccactattgctattattattctcattttaaaatagttaccatgtggttatcattatttgcaagttatttgataacttcttaagttcaatgtattcaaatattaattatagcataaagcatgtgtatatcaattaaactagtatctatttaacacatggtgcatggtataagtatagcaagtaacagtccttcttgccaaaatgcttagccatctgtgtctggatttcctactaggtaacttatcttatcttatcttatcttatcttatcttatcttatcttatcttatcttatcctatctatctatctatctatctatctatctatctatctatctataatatgtatgtgtgtgtatatatatatacatatatatatccccaacttcctcagaattccagccttaaaacacccaaataccttaattacagtgaacatagtaattatctcacatttagaaggatcatagactcagactacagagaacataaagagaagagagagtaccacgtgagatttccattttatacatgcacttacagttgaatttcttctctcatgttcagaggcacattagtttaataatttgaagtaaaaaattttgtgcatgatatggctcggctaatttgggatactgggccaagtgcccataactaaactcaatgctttttgagggcacttttagaaatagaggtggaattcgtggttatcatttagtattttgtgccttcagctatcagtaattttcagtattagattcagtaatttcaaggtcctgaacttcataaaatcccccccccccgctgaaaaattattcaatcccgaaaggcaaaattcaccttcattaaataaatgttagaaaaacaaatggaggtattcggtattagatatgcatgatccaagcatctatctctagatcattcgcacacacagctgaaaaatgtttagagacagtaaccaaatgccaattaaaaatatgtaagtatcatttttagttgtttctagaactgcttctctattttaatcacatcactaccttttaaaggtcaactactgtagaatcattcccaatgttcttagcaatgtgccttagttttcaatgggcctttaaaacacaaaactcaatattatcaatgaagataagtctaaggaatcagatacattttagtatttcattatatatttgttcactcacatgcatgcttctaaggagcttctcatggtgggtgattctgatctttgaggtgaacaaacatgggtttgctctgtccttactgtgtcctttcagtcctacttattgactcagttaattcttcttaaacacatcattttgatattcacattttaatatgagaatttaaaaccttattgcacatgaaatgcttaagttttctataaaatcaacatttatattaactattcctagtgactagtccaaatgaggtattctagtaaaatatttgagaaatatttgccatgtcacattgcaaagattaaaagcaaaaacatcaaccctaagagaacaccaaaaagaacttggaaaaaatgtgagagatgtcgttgtcatctaaccttaaaattgcattctggatatagaaatactgcatatgtatcgcaagttgcagtaactcactacaatttcttcaatctaggtctttttgtttcttttttttttttcctaagatggaaactgagccatagcttattccataaatggtcctgtgactttttcttaaaaagttttagttctttattgctctcctggtaactgccattttagaaaccaatgactgggttttctcacagtgtttcaataagtttcccttagttacagattaagatctggactatttatgaaaaagaagaaacaataatttgtatccattcctaaaatattctaaagctggttagcagaatgttcttagtgaatgtctgtgctagaaggaagggtataaattagaacacagaagcgtttgttagcaagaaatcacatgatcagaagatctagattttttcctgattcaagtttttatttgacattaaattaaataatgaccttttcaaatacactgtttgagaacattctgcacatatgtgatgtattttgctcaactgttccatactcttctcctctaactatcctttacagctccactaaaaattattaatcatttccttcaaactcatgaactcttaagtctatttagcagttagtctctctctctctctctctctctctctctctctctctctctctctctctctttctctctctctctctctctctctctctctctctctctgtgtatgtgtgtgtgtggtgtgtgtgtatgtgtgtgtatatgtgtgtgtgtgggcgggtgtgtttctgtgtgtggtgtgtgtatgtgtgtgtggggtgtgtctgtgtgtctgtgtgtggtgtgtgtctgtgtgtgtctgtgtgtgtatgtgtgtgtgtctgtgtgtgtgtgtctgtgtgtgtgtgtctgtgtgtgtgtatgtgtatgctgtagcatgatattctcaatacagatctcatccctgaagcaaactcactctcccttcagcagtagccatcaattcctaacagctactcagataaaggtgggagggacatcacagaccaatctcccatccatgctgaaattttgacaggtttaacctacagattttgtgactgcagctatttcaaagggatatctttaatttggtagtgacctagaattaagtctgtataatttagggcaccaatagttccttatgtgttattatttgattactacttaggttcattaaatgagactaaattatagtgatgttcgaatcactattcccattgccacagctgctgtttaattgcttagctggcatattaattctcatgtaactcaggtgactctggacctcattatctattgtgtttgaatgaggtcatatgacatttataaatctacattttaggggcttcttttttaaatgtgcttagacagaattctgcttaaacacctgctacaagaatgtccctgtactgtaaggtaaatgcagttttctcttattttccattcttccatgctggtacaaagatattcagtattatcatatctggttttgtttatatttttacttagataactgacccatgtcaccagtattctatctctgtttcagcaatataatgcaattcttaccagtttttgtctgctgatcactaagataaccaatgttttcgtggtgccttctgttttcactagagtccacctgccctctcttctcagcagaaatggagacaaaatctccaaggagatcaacaggtgtaaaaagatttgctaacagaccacaatatcatgtctactttccttcctctctcttttctagtagtacctcagcatcaaatttccatttgatgtgtaccatgctccttggtaaaacttaagtgtaatttatgaatttctgttcaggaggtgccagtctgtgagtaaacggaagaaacgaatgtcagtagtattactgacagcagcactaaattgaagctcccagattcctttctgttcagtgcccattagaggatgccctgcaaggtctgctcaatagaaacatgaagtaagaaatttaaacgtgctcaaaaactctcccaacactgttacgatctccattttgcagataaggaaaagggaccttgtgtatgaggaggcaaatgttgccaaagtatatccctgtagctgcttgatgtaatcatgaaaataggggcatctgtattagaaattgtacatttaagtgttctctttgaacatgaataagagctgcagcaatggatagaagggtaactttgaagttttgaacccagttcatgataattcccccggtgtctgagttatatagatgcccaaagatattcttttgtgcatttgacaaaaggcagaggagattaaatgtgttacagctgagctggtttatgtttcagagttcgaggcctcctggtctacagagtgagttccaggacagccagggctatacagcaaaaccctgtcttgaaaaaaaaaccaaaataaaatgtcctttaaattattaccttaataatatgattttgttaatcgtaccctaattaataagtatctgtgatcactggttatgtgcaaacatattgtaagcaggggatgttaagcatttcagttgcatatgctttaagcagtactgttattggaaacatgccccactgcagtaacaaatgtgtgaggtgatatttctcaaatacgaacatggcaggttactctgtggtagcataatgtgtaaatgtgacagagttatttacataaattttggcaaatccccaggaatttttcttcaagttcattgcctctaactgcaaagtgtaacatcctataagatgtatggaatctacactgaaactctattggaacacttttatggttttacattcagcactgtcagaggttggagagccatgattttctggaaacaactgctggtctacttttggaaggagactagatgagaaagaaagacataactgagtcattgcaaccccaacactgacttcttttttttttttttactgaaacacatgggtcattctatcacatcacctagtttgggtatctttctatatgcatatatctgcatagcacattcttagtaaaataccgagcatatacttatccctgacctctataagacctctctattaccatgaatctattgagtatagttgtacaatttgttatcccttttctacattggtttccataaactatgagatgcactgatttggaagtaaagaagtttgactaacacaaaatcacctttgaagtgttgtggctcctgtctatacatgctaagtgttaaagttatattgcttatgtggattatgaattcattggtttccatgatggcaatcatatgttatcttcattggttaaaatagtgtcagattttctggttttgttagaacaccaccacaataagatacgtgaatttcatattgatctatgccagtggatatctgtgaagaaacctcaaataattttgcacattgtccacaaattattacaaacccaattatggaaaacaaaagaaatttattcttttgcaggtttgaagcctagtttttgttttttgtgatttttttgtttttgtttttgttttttaatcaaagtatcagtggaattctgtgccctctgaacacagcaggaacatgtatttcctgcctcttcctgtgtatcccaagattctcattacatggacatatccccctaggtttattctgtgaccttgtttaaatatcagccattgggtttcaatctcattccaatccagtatgagtttttattgtctaattatttttgcaacaaacctaattccaaatgatgtcagactgaagttctaggctttcatgtcctctgggcaggaaggggctaagcaggtcattctaacacaggtccttaatgcattaagtactgaataaagattgcctgtaactgtttgactgctctcctggtggcaatgctctgcacaggatattgctgccatgccaaattacatgaagcccagtggaagtttggctgcaccaaatgacctcagcctgaacacttgcaccagaacaaatgatgctgactggtatctgagacacaacttaggcaaagagcttgacaagaaaattcataacatgatgcatacagtataggagaaatgggcatgaagaaagttccactgaaataactttctaaggaaaatagggacataaatgaatttgtcttatcaggaattctgcaactaacacatcagcccacattcactaactgcatctccccctctcaaatgaatttctgacaatatttttatattgtttctttagttatttaacacccacggcctcatattgaagctattgtagactaaattattttactctttttcccacctcctgagttggtgatttttagaatgttacttaagactaaaaattactatgttaattcaatgtaaaagagtgaaatagttatcaaaaatcctaacataatatttgagaaacttcaaaaaacaaacctattttagtacttatgaaatgtctataagtacttgatgttgtgtatatttaattgccttttttacaatattacaggaatttgaataagcgataatgtttttcgtttgtaagacttacatagttagaatgaaccaatgacaatagcaatagaagagagatagagtcttcaggtattcacgtactgcagcaattccccttcttaggtaccatttctacctctatcatatcagactatgcttgggcttcaccttgtttcaattcacaaaggccatacttgttatacagaaattgcccaacaactatgacttttggaagagatacacaacaaacttctggcctgttggtttattgatgatacctaggtttttaaccttcttatgaccattaaatctgaaggaataagggctagggagcttaggacagaggaagttatacactaaaaaaaatttatgaaatatacatcatgaaatccaaagttttccatgtatgaatattttatttattatttatcgatttatctatttattgttttcatatctcaatcattgcccctctcctagtttcttctcccaatgtctctctcttcatacttgttgcccttcccctctgagaggatgggaccctcattctactctgagagggagggtatccctccaccctggctccttaagtctctgaagaattaggtacatccatgcccactgaggtcacacaaggcagccttgttggggaatagattccgcagatggacaacagatttagagaaaactgtccttctatttcttgcgggaatcacatgaagacagagttgtacatctgctatatatttgctgaggacctcggtacaggcttcgtatgctctttgactgacggctcaggctctggaagatcccagggttcatagttagctgactctgttggtcttcctgtgtcgttcctatccccttcattgccttcaatccttctgccagttcttcaataaccatctctgacctctgtccaaagtttggctatcagtatctgagtctgtgtgatcagctgtcgagtggagcctctccgaggacagttacactaggctcatatctgcaagcatatcagagtatcactaatagtgtcagggattggtgcttgccaatgggatgggtctcaagctgggccagttattgcttgcctattcccccagtctctgctcagtctttgcccctgcatttcttgtagacagaagaagacttgggaaacagattttgtgggtgggttggcgacaatgtctcttgaatgggagacttacctggctagaggagtgagcctcttcaggttctgtgtcccaactgttatgcctttcctttaaggtcatggccactgactccttggagcttcccacattccagatctcaggcacttctaagaaatttcctccaccccacccccatacctgctgttgcagatttctattcattcttcaggccctctggccctcttgtctctccccacacctgatcctcactccctatttcattccccttcccctctcccatcacgtttcctcctgaggtctcctattactattttatttccccttctaagtgagattcaagcttcctagcttatgccttccttcttgcttagtttccttgggtctgtggggtatatcatattattaagaatatcatccagagtcacaaaagaacacacatggtatgcactcactgataagtggatattagcccaaaagctaggaatatccaagatgcaattcgcaaaacacatgaaactcaagaagaaggaagaccaaagtgtggacacttcaatccttcttagaagtgggaacaaaatacccatagaaggaattacagagacaaagtgtggaacagagactgaaggaatgaccatccatagactgccccacctggggatttaccccatatacaatcaccacaccagacacttttatttatgccaacaagtgcttgctgacagaagcctgttatagctgcctactgagaggctccaccaatgcctgacaaataaagaggtggatgctcacagcttaccattggactgagcacaggtttcccaatgaattagatagagaaaggacccaaggagctgaaaggggtttgcagccccataggaggaacagcaatatgaactaaccagtacccccagagctcctagggactaaaacatcaaccgaagagtacacatggtgggactcatggctccagctgcatatgcagcagaggatggcctagtcagtcataaatgggaagagagtcccttggtcttgtgaaggctctgtgctgcagtgtaggggaatgccagcaccaggaagcaggagtgggtgggttagtgaccaggggagggtggaggggataggggattttcagaggggaaaccaggaaaggggataacatttgaaatatacataaagaaaatacctaatttttttttaaaaaaagagggagcttgtaagcattaggataagagactcagtcttcctatcctgaaatagagatggttagataagagttcatttgacccttggacacatagtaagaagtaaccatatgaagacacatagaatgagcttgtggtaaagtagtagaaagaagaaaatcctagaagagagatacacttaagaatcttctttaaagccatgttgctgaggcaatgttgttcaggaagatgctctcaggtagtaccagttaccatctatctaatcatgtagaggaaacacatcacctccaatagttaggattaaaggtattgcctttcttcccataattgtaccctgagaacattcccacttatctgagccaggcattcagaagttgaaacatatttttctctcttataatctatattccttttagtcctctgttcattattttgctacttaaaagagaggagaaactttgcatatgtattcaacttatctcaaagcactaggatgcttgtttagtatcccacaaattctttgtaaacaaaataattttcagaatattattgcagattttcatttaagtattcaaattttctcaaatgtaagttctagatagatattctcaaaacaggaaaaaaaagggagataaatgttcttattttcttggtttatagtgtgtactgtgtatccatgaaacaattccttgctcagaaaatttttgttcattaacattatatagtatagtttttttaggcataatttaagggcgtgatctgaatgaatgaaatattcctatccaaggtgagcacaatgaaagatattcacaatatcaacgagtgctagttctggaagtgtggagagcctgaccaccaattagcagtctgaacatgttttcttaactgcatgtcctttcagagtctagcagatggccctgatgttacttttttcaaagcaattactgatgaggaaggtgcatctcatttctagatatttctttccttacttcctcacatctaatctttcatcctgggttaggttggtcactatcaaacttcaaagttagaactttgtatctttggtactttggtgtcttggtgatctttgctcttcagttaggtaccatattcttctgcagtctctggtctacctctttcaagtagcggagttcacacagtacatatcatgactttagttccttgggtgttatatgcttctcatccttctttcatagtcagccatgatacacatgatgatgctttagaatcagtgtctgaatacataggttaaaattgggacctcgctctaaaactttgagaatttccttttgacttatttattttaatttatttagtttattttttaaaatatttagtagtaatgcactaggattctaagaatactggtatgacaacatttcagagaatttatatagatgtcagtgttttataagtactaatttctacatggatcattttcactgagtctatgcagatatagaataaacaaatttgcacgtgaattaattcatgcataatgtttatgggagctcactcttatgttacagtgagagaatccagtgtctcagccaactgttattttcactttcagatcctggccttgcttgttagtttattttcatttaaaaacactattttacattattcatttttaggatatctaaacatcaataaaatctaatcttcataacaagacactttaaatatttactattaaattgatccttcagtataaaacttgtgatatagctattaatatttaaaggaactggtggctatttacttaattaaggagatacataaattttgatttttactggtgtgtgtgtgtgtgtgtgtgttaggatattgttttaactgacctcattgctttgagatatttgtatagcagaatgtcctttgtgtcttgtttggtgagtgtccaatggtgagttactgaacttgcttgtgattcctttatctttcatatccattagctaactcattttcttcaaaccatagtccaaagataataccacctatggacttttccttatcagaattagtgctttttttttcctgcttttatttgccagtgtatcctgtgtcatagttttggacaatgcttgctgcattctgttatctccaatcatgctgaaatagcactttgaggaactcaaaaacacttattttaagttgtttaagtagtaacttttgttgtgtaaatacttatatgttcaagtttctgtcaccagtggacagtatacagagaatataatcccttaaccataaacatgtctgtacagggaatcattattggttaatcctgcactatcataaaaccttccatgtctgccttttattttctattactcacttttgtcatcccaaagtctagcatagacctagaatataagaaaaactgaaataacacaatattgaatatataacatgttatacatattgtattatattttgtaatcagaataataatggattctatatgtattcagtgcaaaaaaaaatcttaaagtactcaatatagggtgtcttacacaattttgcgaagataaatctttcaattccctatctactcccttcactttatatcttttgatgcctttcagagccaatttgatgtatttctccactgggttatagaacaatcagctttttagaaaagtatcaaggcaaacaggattttggggtggaacagatgtgtcaaatctagcactgcagtaggaaaagtaatctacagagctcattctggcatgcctcatcccagaagaacagttggtgacttcactccaatacacttacttatttcagacataaaagaggtttcggccaaaagcaatggcaatgcctggttatgattttggtgctaaattgatgtctgaaataatccctagcaaattttgagaaggatttcagctgggaaaatacctatgacttttgtacacagagattagtgtagtattagagtagtaggttcaaccctatcttagacaatatgattcaaatttcggttaagagcttatatccattaagtacaaagtagaaactagtctatatttctcactgaaaatactctattttaaaataattctaataatttgaacaaccttctagtgtcccagagttaaatttccattgtttttactttgtctcttgtttttcctatcccttccctacttcagtgtaaacaaacactgagattaattgattactattaacaaaaatgtctattaacaaaaatgtctatttttaagaagattcaagtcatactccactttctactgatttcacacaggttcattccatgttcataattcatcttctttgtctccttcctttattttactcctttcctgcctccacctagtctcagaagtaaatattaaattaatatgatggtcatatagatagacctttaccttagaaagacaaactagggaaagcacccaaggagctgaagtggtctgcatctctataggtggaaaaataatatgaactaaccagtacccccagagctcctatttctagctgcatatgtagcagaagatagccaagtcggccatcactgggaagagaggccccttggtattgcaaacttggtattcccccagtgcaggggaatgccaggccaagaannnnnnnnnnnnnnnnnnnnagcatttgaaatgtatggactaaggctgatcttcaataacaacataaataatgaaaagccaacacttacgtggaaactgaacaacactcttctcaatgataccttggtcacggaaggaataaagaaagaaattaatgactttgtagagttaaatgaaaatgaagccacaacatacccaaccctatgggacacaatgaaagcatttctaagagggaaactcataactctgagtgcctccaaaaagaaactagagagagcatacactagcagcttgacaacacatctgaaagctctagaaaaaaaggaagaagattcacccaagaggagtagatggcaggaaataatcaaactcaggagcgaaatcaaccaagtggaaacaagaagaactattcaaagaattaaccaaacgaggagttggttctttgagaaaatcaacaagatagataaacccttagctagactcactagagggcacagagacagcatcctaattaacaaaatcagaaatgaaaagggagacataacaacagatcctgaagaaatccaaaacaccatcagatccttctacaaaatgctatactcaacaaaactggacgaaatggacaaatttctagacagataccaggtaccaaatttgaatcaggatcaagttaacgatctaaacagtcccatatcacctaaagaaatagaagcagtcattaatagtctcccaggcaaaaaagcccaggaccagatgggtttagtgcagagttctatcagaccttcaaagaagatctaattccagttctgcaaaaactattccacaaaatagaagtagaagtaactctacccaactcattctatgaagccacaattactctgatacctaaaccacagaaagatccaacaaagacagagaacttcataccaatttcccttatgaatatcgatgcaaaaatactcaataaaattctccctaaccgaatcctagaacacattaaagcaatcatccatcctgaccaagtaggttttattccagggatgcagggatggtttaatatatggaaatccatcaacgtaatcaattatataaacaaactcaaagacaaaaaccacatcatcatctccttagatgcagaaaaagcattcgacaagatccaacactcattcatgataaaagtcttgggaaagatcagggaattcaaggcccatacctaaacatgataaaagcaatctacagcaaaccagtagccaacatcaaagtaaatggtgagaagctggaagcaatcccattaaaatcagggactagacaaggctgcccactttctccctacctattcaacatagtacttgaagtcctagccagagcaattcgacaacaaaaggagatcaagaggatacaaattggaaaagatgaagtcaaaatatcactttttgcagacgatatgatagtatacataagtgaccctaaaaattccaccagagaactcctaaacctgataaacagcttcggtgaagtagctggatataaaattaactcaaacaagtcaatggcctttctctacacaaagaataaacaggctgagaaagaaattaaggaaacaacacccatctcaatagttacaaataatataaaatatcttggcatgactctaactaaggaagtgaaagatctgtatgataagaatttcaagtccctgaagaaagaaattaaagaagatctcagaagatggaaagatctcccatgctcatggattggcaggatcaacattgtaaaaatggctatcttgccaaaagcaatctacagattcagtgcaatccccatcaaaattccaactcaattcttcaacaaattagaaagagtaatctgcaaattcatctggaataacaaaaaaacctaagatagcaaaaactcttctcaaggataaaagaacctctggtggaatcaccatgcctgacctaaagctgtactacagagcaattgtgataaaacctgcatggtactggtacagagacagacaaatagaccaatggaatagaaatgaagactcagaaatgaacccacacacctatggtcacttgatcttcgacaaggaagctaaaaccatccactggaagagagagcattttcaacaaatggtgctggcacaaatggtggttatcatgtagaagaatgcaaattgatccattcctatctccttgtactaaggtcaaatctaagtggatcaaggaactccacataaaatcagagacagtgaaacttatagaggagaaagtggggaaaagcctcgaagatatgggcacaggggaaaaatacctgaatagaacagcaatggcttgtgctgtaagattgagaatcgacagatgggacctcataaaattgcaaggcttctggagggcaaaagacaccttcaataagacaaaaagaccaccaacagattgggaaaggatctttacctatcccaaattagataggggactaatatccaatatatataaaaactcaagaaggtggactccagaaaatcaaataacctcattaaaaaatggggctcagagctaaacatagaattctcacctgaggaataacgaatggctgagaagcatctgaaaaaaaacattcaacatccttaatcatcagagaaacgcaaatcaaaacaaccttgagattctatctcataccagtccgaatggctaagatcaaaaattcaggtgacagcagatgctggcgaggatgtggagaaggaggaacactcctccagtgttggtgggattgcaagcttgtacaaccggtctggaaacaaatctggtggttcctcagaaaattggacatagtactactggaggatccctcaatacctctcctgggcatatatctagaagatctcccaaccagtaagaaggacacatgctccactatgttcatagtagccttatttataatagccagaagctggaaagaacccagataccctcaacagaggaatggatacaaaaaaaatgtggtacatttacacaatggagtactactcagctattaaaaggaatgaatttatgaaattcctagtctaatggttggacctggagggcatcatcctgagtgaggtaacataatcacaaaagaactcaaatgatatgtactcactgataaatggatattagcccagaaacttagtatacccgagatataagatacaatttgcaaaacacatgaaactgaagaagaatgaagaccagtgtggacactttgccccttcttataattggaaaaaatcacccatggaaagagttacagagacaatgtttggagctgagacaaaaggatggaccatctagagactgccatatccagggatccatccaataattgcctccaaatgatgacaccattgcataccttaggaagcatttgctgaaaggactctgatatagctgtctcttgtgagactaggccagagccaagcaaacacataagtagatgctcacagtcagctattggatggattacagggcccccaatggaggagctagagaatgtatccaaggagctaaagatatctgcaaccctgtaggtgcaacaacattatgaactaaccagtaccccggagctcttgactctagctgcatatgtatcaaaagatggcctagtcggccatcgctggaaaaatgggcctattggtcttgcaaactttatatgccccagtacaggggaacgccaggaccaaaaagtgggaatgggtgggtacggaagtgggggcggggggaaggtatgggggacttttgggatagcattggaaatgtaattgaggaaaatacataataaaaaatatttaaaaagaaaaaatatctaataaaaaataaataaaaaagaaagaccaccccatttccactcaataaaacatatcacctagctaaatctaagggttgtctctattactcatggaagacattttaagcccaggagtctacttttcataaaatcacaaattattatgagtgagaacaacattatattctaatgctactgttgcattggtaaatacatgtaccagctcatgtattacagctatttcctagataacttcattttatataatagatttctaatttatggcaagtattagttcataaacatatatagtactggtcattttctacttcaaatagcaactaaagaaaagaaaataatgcacaattttcataagtgaacatttttatttttcactgaaacttcatcaggaccatccacaatccatgcttacaatgtatggtcctatgtagattaaaatttagatgatggcattattctgtgtaagagcattttctaggtgttaaaagaaattcacaggaagtaaaacataattataagttaatggttaaaaattataaactgtgtattactagaaaaatgtagttaatacaaaagaggataaatgtgtgcttgacaaagccctgttgcacaggtgattatttttcagtaaactataaaggtgtgagtacatgaataatctcttaatgattttgagtttaaatatttcaaaaataaattgttactggaaataaatagtgttagaaatgtgaatgagatatgtgattaagatgaggattacagcttttaaagtatttatcatttaaaaatatttctaatacacatttaacttccaggaaactgattggatgacatcattgcatagacatttaatgtatttatatatgtacatgtgttgctttttcttcacattactggattggcctctaattctgttggaatgaaggcaacaaagggagaggaaatggaccctacagattgcagggaaagcaggagttcaatgccatctttaactgttcttatgtggtgttgagaacataaatgctttcttgtaaatgtatttaaattttaacttcctattttgaaaattacgcttaaaagataacatatggtacgttccagctgaactagaggccaatccaggagagatccaagacatggaaacatataatttttcatcatttcgactatattctgtgactaacatgtttttatcatggcaacctgaaagggttggagattatgtacaataccagctgcagcagttagtaaaagctgctcagaagaacggtgtagactaagactacatagcaggaacattacgctccagttagatgtttactttttaatttgcttttttccttttaatatttctctatcaccttccctaatatgcacgtatttggcaacttatgagtatttagacatagttttaagatttattgttgtgtaatgtcgcaatacatgtctctcaaagaacttttagctacatctcataaatatgaatgttgaataatcaactcttaaacatttaaataatcattttgttttcctttctgtttcaattcattctttttcgttcttataacaacatagtaattttgtgcattaacaagttttgttacaatattgtcatatagtatatttacctccattacttattgtgccttcaatcctctttcctcttcccaagtaatttcttcacactttataaatgtacttctgaaattcaaaacatggtcatttaaaatgatcacaattgtgttgtggcaagaaactctgtagactatatcatactaaatttctaaagactcgtttagctgcgtaatgggttactaagaactgtatatgcatatgtgtgctgaaaaagcttgtattttctcatgtcattgggtgcaaattatgtgtaacataatttggataagttgattgaccgtgaagttcatacaagtttagaattttatctttcttcccaattgtatattgacccctttaaactttaataatctttttgtctagagatatatttctgtattcatataaacatctacatcttactaaaatacacatatattatttgataaaactactagacaagtcatagaattttatgtaaaagttatggaattttcagcctaccaacaatgaaggcactcatcagatcacatgaataattagtatgtgtgaagtacatactgagtcctgtagttggttcaattcatatattgagcaatggcaaattattgtaatatttttaacaatgacagttctgaaagagtgtggtgtggatgggtcactgttttggtctatgttttctactttatagcaacctgtctccttaccaattgttccatcattaagttaatgtgtatactctaatattctatggttcatgaacttagttgacgaaggcattaatataagaccatttctttcctgtcttcaatgaatgaatgaaaaggcaacatattaatatacttgaagcacagttagcactcctaatattatgctcaaatgaatattatctgttctgaaaaatagaatagctttcatagagatagagaagtacaactctatatgataagaatcttaaatggtctagaaaccatgtcacataaatctttaacaaagtagagaacatatttgtggtgatcaggaaatagattccattttttaaaaatatgatgtttatgtatctttcatacacaaaagtatatggaaaggttaacataaaaatgattgaaagcagggatgggtaggttcaaaacaaagtactagtcaggaagaaagcacagacacagcctgacccatttcctgttccctgcaaatcttttcaagtattctttttgttaatatttacttaatattctagttaagcatggattttcttatgtattttaaataaattgtttgtaaccaacaaaaaaagagatatttttttttcactgtgactcctttatctgtgtcttggggtcaatatatatttctccttttaaaaaaaagtttcaatttatgtatactattaaattgttggttttctgcatcgatgtgaaatttcttttctctctcatttctgttgtttctttctactgttctattttgaattgacttacaataattgttccatcaatctgcacagagtattgatttcatgtatcatcattctaagagtgattaccacagcaaatacgcactgaatacagatcaagtgtggaaaagttcaatatttgtatatcacactgtatctaaatgagaaggtctagaatgtaatcattctagccactgaaccttttcatgaatcatcatggccaaatatttcagttctcattattttgagcccacagcactaatatttcagttttacatatcatagttttgttgatcttacttaacactattaatattttttgaaattttaaatttgaggctcagattaactggatttaccagattcttgttaaataaaatccaacttcggtgccatattttttatcttcattttcttttctctctctctctctctctctgtgtgtgtgtgtgtgtgtgtgtgtgtgtgtgtgtgtgtgtgcttgtgtgtgtgtgattttagtcgtcttcccatgaccaacatctattttcacttccaagtgtttcctcttttttacatttgaattttaaaacaccagatttagggtagaaatgtggataaaccttctgagttcatttgtacatttctttccttcaaattctttagctaataatgggtgaaactatagatctaactgaataaaagtttcatctcttatgtcgtgatctctataggtactagaagaagtaagaaatgttaaaaagaggctaaccactctcaagtacttggtcagatacactcaaaattttctctcactcagttgccaagatttaatattttcctgttggccacaatgtaaaatatgttttgtgctgcatcaaagttttagatagactaaaaattgcttatatttataagaatctagctttgaataaatgtattttatcttttaattatctgtctaaaatctgtcctttcttttattcttctttcattttttagaggttttcttcatttacatttcaaatgtcatcccctgtcctagttttctctctgaaaatcccctatactcccctgtcccctgctccccaacccacctactcccacttcctggccctagcattctcctagagtggggcatataatcttggcaagaccaaggcctctccttccactgatggccaactagcctctgctacatatgcagctagagacacagctctgggggatactggttagttcatattgttgttcctcctatagggttgcagaccctgtcagctccttgggtactttctttttttttccattttttattaggtatttagctcatttactaataccaatgcttacccaaaagccccccaacccccccccactcccttacccacccactccccctttttggccctggcactcccctgtactggggcatataaagtttgcaagtccaatgggcctctctttgcagtgatggctgactaggccatcttttgatacatatgcagctagagacaagagctccagggtgctgcttgggtactttcttaaagctgaactttctaccttttatttttgcccctcagattactttttgagaaattctcaatttatagatgttatttttgagctgaatattcatccagaagtagtgatgtgtgagtctgtgcatgtgtgcacatgcatgagcatgtatgtgtgtgtctgtgtgcctgtgtttctttgtgtttgtgtgtgtgttaatgaagaaatacatatcactgcagggtgactgggtttaccttgtacctctctgctggaagaaatgattccctgctggttttagacaacaagactgaggacagagctaagtttcatactgagaataattaggataacacagatcttgtttaattatttcagtgcattgttcatagttaggcataacatctattttggtgtttttactaatttttagcattgcttctgataagaagtatatttccagacactgacacacaatcacagtaagaaactccaaaggatagtgaccacacattttaccaagttgagaaataatcaaaaatactttgaattaaggctttgtgtgtgtttaaattttattttaaaacttcctaaactctccaataatggggccattttattcgagtttactttattgtctagtttttatagccactgttaatcatgtgtactactttttttttcctccaagaagtcaagatattaactctaatttagtgctaattttctgcttattacctgcactaccaagtatcatcttgttgacttaagaatttatatctctgggatttttttccctccctgccactcattctgtgattgtactcacaggagatgttaatagaaggctctacaggaaggactggtaaccatggtgatatgagagtgctttctgcaataactccactgtacaaaataatttatgcatggatgtaaaatcacagatgttttgaaccatatgcaagctatatttaaccaggctacaagtgacaagctactggggagttactaatccaaaagaggtaagcttcagttccatagtaatttttttcccctcatgccctggttgactcttccaagatacagggtctaagaagtggggtatgagtgtgtatctttagtctgagtcactgtgtgtcagtaactcctgtgtgtaagagagaatgatgtaggaaaatgaatgtttggaagagacacttaggaagatgcacacaggtgcatgagaagaaacaaagaacaacagagtctgttcttactgtcttatagtatgtccattcctgaaaatgatgttacagaggaaatgatttcacgacacttacttttcagcttaaaaagaaaactcagatctttattttaatatttaaactattaattagtgcgtttatcagcaaaaatagttagctcttatggcaataatgcttgcagctcagtaaaagaacctatctttataattatttgagaggatcaaattgcctttaatataagttggttatagatcaaaataaacatttaattcttgtttcaaattcatgctttgaaatgttgaaaatatttatgttctttcctttaaactcagttttagaaagaataagaccttagctattttgaatcttcacaatatcctgtgaacttttaccagagttggacccacaaattgcatttgtagttctaagacatgaataactttctaaattcatctttccacttgtaaaaataactgctgcttttagaattggttttctaaaagagaggctcgcagaaatcacaaaattaatgcaatactttgtgcaatgaggctattttcagtaccactggacttttggaattcagaggcgaaggaaaaaaatgggaaatggaaatgaaacaatttgcattgcaaaacttctcctttctcatgatgtcttatgtgtttggttgccttgtcttcctccttcccatgttcgttatttcttggtaaaatgttgcttctgcctttctttgattaaagtcatcctagacttttgcccctgactcaacctctttgcttactgcttttatttttaattgtttctcagtctcattttaatataaattgactcactgctaattaagtacatttttgtagatccaagagagtttcctgttaggcaattgtatgctccctccttgatgatccatttctgaagcactaatgttcaattaaacattaacaaggaacctccatattaacccaggttaagtttagtacaaaggggattagtgcatagttcgagagagtaactcttgctatacaggttttgcttgactgttggtagagtactgtcaatttagagaaaaggggggctttctattacaataaagtacactagagctaattgcctttgacaatagcatgttcagaggtctcagttggccacaacagcaataagatatatacaacgagcaaaggatttctgggtggctcttaacctgctactttaaaaaatgtgcatttgagcaggttggggtgtcacctgcacttaatcccaggactcaagacacagaggcaggtgacctctgtgagttcaaggccagcctggcctaagtgatgatttccagggtggccaggaaatctcactgtatatagtgagactatgtgtcccaaaacaaaacacacacacagagatatagacacacacacacacacacacacacacacacacagagagagagagagagagacacagacgcacacttacacacatatgcacaaatcacaccagaataacaacatcaacaacaaagggaaaaaacaaaacttaaacaggaaaaagaaaaaaatacatatttaaaaatatttcctaagttttccacggtaagtggaaaattttttgcctaatgaaatttattcctgagattcggttaaatcttcttgcatacttctgtatcctgacatcaaaaatagaggatattaaaaatatttagctgcttcacttatttatctccttctcttaacgccttcataaatgtaaatgcttttctgatggtgctgttctttgtacagattataggaataggaacacatgatgttttcattgcagcccagttttcttacaatctaaccaaaatacaagtacatattcatatcttctactggcatagtattgtagaggatagcatgcttcctactttaatagggagttatttcttggtttcaatatatatatatatatatgggtttttgcctaatacctgagtcacaggattactgatgttaatctcttttgagggaacaaggaaaaagaaagcaaatgagcttcataggaagttaattagacacaactatcacattctgtgtacaatgctgtgactgctatgtcatattctttcattgatcagagtatacacttgctgccccaaatggctgcatataacatatgattatgccttacatctatagcccttaaaacaagtatgccaacaggatatcagtttagacttccataaagtaggatttttttattttgttctatacacttcatttttactaattgaatatcttttctcttgcacaaatcttttcttctgaaatgtaatagcttcacgttgtccatttatcttcattaccagtaacatgtagtaaatttgcctatctgtttgccctttagaaaaacacaaagcatagattattgtaaaaccaacagcacacttgtattttattagtgatatctctatctgcaattgatttatatgtgtgctatcatgggtttgtatgagtgtataatctatcattttatctattctctagttatgcaatagtatagcaacccatatatatgtacaattatatttatatataattcctttacatgttgaatattttatatcaataataatactccacaaaaacattgaagtatagtatatgtctctttatgtgtatgtgtggatataaggatgtatacatgaatatcttaccttaactaatactcattttaagtattcccaatgtttaatcattattaaacttgtggaagatttactcttagaggaaacaaaataatgactatctaaaagctagttgtttctgatctagttaacagttagggaatgtctgcttttgaaatgttgaaatgcacagttatcgttaattttgttggattcccagtgtcatttatttatatttgtgacatatgtatggctatacaacatctcatactagccatcatctttttttttttttttcttttttaaccagtaagtcccaatttgtgcagagaggcatggtgacatagtcttgctcagtcccttgtagccaacaaaaagaaagagtgaaaagaagagtaaaatgggcacttgtactgtgatttccctgggttgtcaatccagttttagagctgaagatttctgtttactttctctgtagagtaaatttcttctgtaaaaataaaattttgtacaaaaaaattaatggtatttttcttactattatctcttcataacatctaagataaattcaaatgtgatattaaaataaaatgccacattgcacatgagcacttcagattgacatataaagaattcatggactgctataaatttctgttcaacagcctctcttgttgcatctatgtatctatgcagattccataggaacatataaccatattcttacttcagtggaaaatttatttacttgaatgtaaaatgtaatttacaaaccatgtgaaataattggtgtaccttgtaaatattcaaattgtggtgcaattaatataaatatttacagtgcttctatttgcatatttctattctttggaaatcatgcagaacatttatattggagattaatatcattaagtccatgtcaaaaggctatcacctagtctaatagtgctaggataggaagatgtagaagcaagtatgtcaaatttaaaagcctttgtttaaataatgtaaccagccagcaattctgacttttcatatccttcaattcctaaacaaattgggaattaattaaaaattttatatattggactccttaaatttctagctattttaccagtatatatctaaatttctcattcatcaatgtgaaataaacaaatatatttcaaaaagttctgggtacgtgtgtgtagtataaacaataaaatgtgggtctggaaggatatgtcagctttaaaaaaaatttttttttattaggtattttcctcatttacatttccaatgctatcccaaaagtctcccatacactcgcccccactcccttacccacccactccctcttcttggcactggtgttcccctgtactgaagcatctaaagtttgcaagaccaatgggcctctctttccaacaatggccgactaggtcatcttctgatacatatgtagctaaagtcaagagctccgggagggtgtgtgtgtgtgtggggggggggatactagttagttcatattgttacttgacctttttcctttactgcttttaacattctatctttatttagtgcatttgtggttctgattattttgtgtcaggaggaatttcttttctggtccagtctatttggagttctgtaggcttcttgtatgttcatgggcatccctttctttaggtttgggaagttttcttctattattttgttgaagatatttgctggccctttaaattgaaaatcttcattctcatctactcctattatccgtaggtttggtcttctcattgtgtcctggacttcctggatgttttgagttaggatctttttgcattttgcattttctttgatcgttgtgcctatgttctctatggaatcttctgcacctgagattctcccttccatctcttgtattttgttgctgatgcttgcatctatggttccagatttctttcctagggtttctatctccagtgttgcctcactttgggttttctttattgtgtctacttccctttttaggtctagtatggttttgttcatttccatcacctgtttggatgtgtttttctgtttttctctaaggacttgtaacactttatcagtgttctcttgtatttctttaagtgagttattaaagtccttcttgatgtcctctaccatcatcatgagatttgcttttaaatccgggtctaccttttctggtgtgttggggtgcccaggactgggtgaggtgggactgctgggttctgatgatgatgagtggtcttggtttctattagtaagattcttatgtttgcctttcgccatctggtaacctctggagttagttgttatagttgtctctggttagagcttgttcctctagtgattctgttagcctctatcagcagacttgggacactagctctctcctgagtttcagtggtcagagcactctctgcaggcaaactctcctcttacaggcaaggcgcccagatatctggcatttggtcctgcctcatggcagaagttgtgttccactcaccagaagtcctaagaacctgtggagagccctctaagggccttgggggtgttcgctgactctgtgcccaaggtgacccggtgctggtgctgaccagaagggaattgtgaccctggtcaggctggattttttgctttcctaattaatgctgtttcacgtcccacacgattggattggaacagaagttgtgttccactcaccagaggtcctaagatcgcgtggaaaatcctctagtgaccttgtgggtgtccaccgtctcttggtccaaggtgacctggtgctggagctgaccacaagggacttgtgatatgtcagcttttaaaatgcagactcttcttgcagatgagataagtgcagatcccagaacccacactgggctgctcataactacacagaacccttaaccagggaatctaataccatcttctggtccccactaacactgcaacaacatgtacaaacatacccacctgcatgactaaaaataaatgtaaaatctttaaaaatgaatacttaattttaaaccatctgttcagagattttaatttagctataaatacaaatttctgtgttgatgaaagttaaaaatattgttaaaattttatttatggattcatttgtagtccaaatgtaaataaaaagattgccagaacagagttattttaatccctctcattgtctcttagtcttcttcccctaggatcattttttgaggaacatactttaataaagtttaagaatttctaatgaacagatgagctcacagcataatcgattaataaaatgaaacaatattatgaaaatattatttatgtagacatttaaataaaagaaataatatttttgctaagtagctatgtttgtttaatgtttgacctatataaatttttttataacgatacagatcattaacttacatttatatttagggaatgcaacacttatttgaatgacccaatttttgatttagtatagtattatttatgaaataatcccacaattctatcttttttgtccccattttaaacaaatttcatctcgtgtgtggtgtgtggtgtgtgtgtgtgtgtgtgtgtgtgtgtgtgtgtgtgtgtgtgcttacttttaaaaataaatgataagccttcatgctttattgataaacgtgtcctctcttatctaggcagaaaagaagaaaaagagagaggaagagagggaaggatataaggaatgatggagcaaaattaaaaactaaaatctaaatatgatattactggattgggctgtttctcatctggttttcagtttcttaactttctcatgataagcttcattttttatannnnnnnnnnnnnnnnnnnntgtgtgtgtgtgtgtgtgtgtgtgtgtgtgtgtgtgtgtgtgtgtgtgtgtttgtgttgtatgtattctgttttactcaggtaagagcttcaatttatactgggtattccattatactaggtttagcatcatttctattaggaagccagattttagtgttaaaaaaacagagaaaaattttggtcttatatttcttgaaatggggatatggaaaaaagacacttgcaggtgataacttaacccagagatgggattaggtttagcaatgggtaagaaaagctgttgttcttagacttaagacttgaaagtgtaacagcttgtagtttaggtagaaccaaatgtcgtctgctggcctttgcacatagcactatcattgacctcgaatctctctgtttcatgttatgtattctgtctttacctgtttgtttgtttgtttgtttgtatttgttttacctgtctaacttattcaaataaaaattccatgtacctaacacaaaagctggtttcagagataatgaaaaatcaaccaaaatcgtagttaatttatcacctgcaagtgtgctatttctatatcccattttcaagaaatgtaaaaccaaatttttttctatgttgtttaacattaaaactggtttcctaatagaaatgataaccaaatatcaaaagttgaagatatttggaaagttttatttttttcctgaatccacccttctatgagtctaaaagggagtttccaaaatagcacagctgccgaatcagatgtaatgtattgctttggacaatttatcagcattgtctcccaagagtaactgttagtatgacacgatctctgcccagatgtcagggcttgagatgagacagctctgacagctgagctacatttaatctatcaacttagctgagaacattctgagagataatagatccttccatgcaactaagttttattttcatatttaatactattcacttttagtcagagatgaagaaaatgatcttgcaagaagggaagttgctagaggatgaagaaacacaaatatttcagcaaatcagtgaatgtgacaatatctttttttttctagctaatggaagctccagagaatgagaacagcaggcacattgttcaaataaaatttattattattcattataatttaaaagatgtggagttacccaggcagtcttacttaaaaataacagtggatgagattctggggggaaaaaagtttaaagaagtgagctatgtgtgtctttctgtcttaaagtgtacaatgtatccatgaaaatgatttttctttttagaagtgtgtattcagaaataacttttcttggcaacagaaatcaaactctttgttgaataatttaaaatatgatttttgtatatttacatctgctgggagttgaagccctcattagtactaacctggtgttgtaagaactgtctaattagtctctgtacatctagtccttctgatgctgcaaatagagctagcatgttattcgctgtcatcactgtgcctgcatgatcactaggatgaagtgtaatcttcctttacattcatgccactgtgccttgcctcatacattgcattcttttccaatctgccatttttcacatgagcagcacttagctatatgtgcctagcaccgattctttaccagttctcatagctcccgttcaccctctcctctatgttgcatccctgtctttctaaacctccaaaataaactctggcctttccaaaactcttatcccctgtaattactttcacttcgaaccttttctctgcatcacctatcaaattttctgttttggggttttcactaaatttatactaaaattaacatttttttgcaagagtttgtctcttatgataatgcaaattgataggtgagatgagattgctactcattattatttgttattagaaacttggtattagaaattttacttagcacacagtggatgaacaacttaaatttctgaaactaaaatgacataaaattctgtaagagtagaggtttgatattttgtgttgatttgaggcatgctctcactatgtagctctggctgtcctagagttcactatgtacacaccagcctgaccaagcattcagaaatatccactatcctctgccttcagtgtgctggatcaaaggagtgtaccaccatgtttggttaggtccgatgttttaagtgactaatgtagagcgagatgaatttaagaaaaaggagtaagaaaatatggaaaatatacatagctaaattttgttgatattctttactgtacgtgtatgaaaactcaaaatttgcaaacctgtctgtttatggtttcttataatacatatttataatgtagaaaaattcttccaaaaccagaaaacacaacataaagcttgttaaggctacaagaacttacagcaagcactcttctaattctaagagtatcttcctgtcatgcctccttttttgacctataaagcaattttagatggaccattgctgtcctacaatagaaagaatttcttttctaaatattttattagtagaggtaggagtgatgatactaggccacataggatcaaagttgatctcaatacaatgcaatcagtgctcttgcctaaaattttatttccagtatattcattaggatctttggctctttttgtttacaaataaaattatcagttaattcaatttggtggataagtattcatttatacacatttaccacatatcccttgtcaaaactttgatgagatagtatgctagctatctgggaaaatgtgatttttgttctcaaaggaattttatttagcatccatggcattggtcaagataacacaaagagctgagggaaggggaattttagaaaacactaaaaggcaaacctactggactttgattcttcaggaaagaatgacaagaagactaatgagaaaatatcatttctatttggttggaatttttaggattgacaaactgagtctggctttgaactatctaaaacacagaagaaaattgccatgattagtgcatatatatatatatatatatatatatatatatatatatatatattgatttaagacctcgtgtttgagtaccctgagatgtttctatctgacataggtgaaatgctaactcaatatgagattttggcttatcacattgaaagtaattttccaaactccttgtaaaatgacttggtacagtttggctgcaatctaagacaaacgaattgctttggaacagaaatgtaggctgtgtaagaaacagaatatcctactgggacttcaatggataattttcttcctaggatgataaccttttgaaagaggatcatgaatcattaacacaaatatgagtccaatagcctgggtaacagggaatccatatggccagaagacctttggatgctctctgtggctaagattgccaagaatcaggagccagatatgagtcaaggactgagagtagatcttataatcagattcccagagagccaatacccaatgtttttcattctttcttcttattccttgtttttcttttcttttctgtttttaaccaaacctgttaaaccaaatgaaaaacaaaacaaaacaaaacaaaacaaaaaaaaaaaaaacaagcaagcaaacttttttcttgctttcaaaattggaagcaaataaaattgtctaagatgggatttctacacatataatgtgtacattcaaattcatacatattcctgagttcaaagcagttgttgttccttattttacatgtaaaaaaaatccaaagcactcaattaaaaaaatgatgaagtagaatcaatttgagttgatatgtgtgtgcttcaaattcatccttgctctctctgaacagctgacatgcccaaatcccctttggtttgcagtgtgagattattccagaaaatttatttttaaatacagattatttagtacaattatgctccttgccctagagtgttacttaagtcttcttaaaagaagaccttaagattgatactttaaaacaaatctcagctttctcatatctcattatgctataaaggcaagggttatgttatgggaaaggagatatgtggggtgatgattctattgttaaaactcagtcagtttattatgacttgagattgcaaattctcattctggtacccacattcatcaaataaacttaataatataccatgttaggtttccaagtctgtactcatactatatggtcttttaaaatatttcatccaaaagatgtttgtcagaaccagaagtgtgaagcaaagctctctgaatgtctcatggatagctgtctttctcctgtgcctgcagaatctcttccgtttgtgcttgcccagttcctaatacctgtggatgaggcatctggtcattctggtttagggctcacttttatgatcttcttttaacttaggtttaaagaccttcttactagaagtattgtagggtaggaatccaataatgttcttagaggcagtacacatgatttctgcagtatcatttgtactgaagtaacattatatgttagttttaagactgcaccagctatcatcatttggaaagaagacttcatttcaaaatttaaaaaatctccgcttcactattgcagtgggaatatttttttgcccttaatagcaggaaactaagacaatgttttcattcctttctgttaaattattatcctatttttggtgaaagatcttacctttttatattattcttttcctaaaattagtattagttaatacaaagcatcatgttaagggtagactaatatgaatagataacacatggttaagaagatggctcagtgaggaaagtgattatcaatcaagtctgatgacattcattgatccctgaatcccaggtaaaagaggaaggagagaatgacttcacatttttctctcacctcttcatgtacactgtagcataaagctaagtgcgcacgtgtacacacacacacacacacacacatacacacacacacacagccatcataacatgtatacgatacaaataaataattcttataataaaatgaataaagactttattgtagtagtttaaattaggactcaggcagatgccttgacagaagcattcagagtctcatataagtcaccaaaaatgtcgaacagccaaatatttatagcagcttctttgaacatgtatctctattgagagattattttgtgtcaaaattgccattctgcatattaaatatacactctgtctcattcatttgtgtccctccccaaagctattgattttgttccattcattttaaaatgaaaaaagtcaggctgagaaattatttatatcacattattagtaagtaatgcattataaactaaaaatcaggattttctttctgattccttcaacaaggatttacagacaattctttacacagtcttcctttggagtgctatctgatatttctttcttcctgatagactggaaatgatgtgtttagattaaaggtacctgaaggaagctcagagctcagtccctgcagttctgaacaaggtcattcaaagcacttatgaaaagctgacgcatatttatttgttctacaaaaatgtaacataccactgtactgcctacttttcttggtactgtactatgatattcagagaaggcaactggccacattgttttcatagcctggaagcagaaaatagtaaattaagatggccagcataatttctcaactgtacacagtccaaatagtgctgccttcactcaggttggaccttcctacttcaattaacctaaacttatcttatttaaacattcacaggcatgccaagaagctagtctccttagtgattctagattgtcttacacagacagctaatattagtcatcactagttcaacagacatagagcgtactcagatatacagatacacatcaggacaagtctattttgcatgaaatattaatcattgaaaatatttgaatgaaattttttagtagaataaaaaaatttcccgccttcctacaaaattagtaggagctcattttttatattgcccatattcaatgtgtgaattaaaaatatttttattagatattttcttcatttacatttcaaaggctatcccaaaagtcccctacactctccccacaccctgctcccctatccactcactcccacttcttggccctggcattcccctgtactggggcacataaagtttgctagaccaagggccctctcttcccaatgatggccaactaggccatattctgctacatatgcagctagagacacaagttctgggggtataggttagttcatatcgttgtttcacctatagggttgcagaccccttcagctcttgggtactttctctagatcctccattgggagccctgtgttctatcctgtagatgactgtgagcatccacttctatatttgccaggcactggtacagcctcacaggaggcagctatatcagggtcctttcagcaaaccttgctggcatatgtagtagtgtctgtgtttggtagctgattatgggatggaccctgggtggggcagtctctggatggtccatccttttgtcttagctccaaactttgtctctgcaactccttccatggatattttattccctattctagggaggaatgaagtgtccatgagttggtcttccttcttgattttcttgtgttttggaagttgtatcttgggtagtgaattaaaaatcttaattgaatattaaatttgttgattttattccagcatgcaatttttcctatatgtagatgggaaaggaaatcaaagttcattttgactcagacacattattcaaaacacttcttgacaatggaatgtagtttgttttgaacagtctgaatgaaaaacaagaattatattctctttggagcgcttctccctctgatgactgacatatgtcataaagttttacttccctggattctctcagtgcatttgaggagcagtcagtcttcagtgcattcttggtcttttgcacatgaactttcactgctctttatgaaaaaaacatacagccttcattcagcttcttttctcttcttgcttttacctcaaggtttttaagtttatttttgttctattgtacaataggtaaattttccaagtgagcattatgtgcaggatgataggcaacgggacagctttgacttctggccttaagtgaaaactgatgagatagtagaaagagtcatcttttgacagcacaaattctatccttggtgatatcctattctttcctacaaagacatctactacaagaggagtgctgttttcaagattaaaatgtccacatgtacttcctaatactttatattgggtttgaaataatttctttaaaaataggtccattatctttttcctgctgcttccagggataatgttgtagtattgcaactttttctgaatttatattcatgtgtgtatgtatgttgcatgagtacatatggatatggtgtaatgtatgcagtgtgtgtatatgcacatgaagccacaggaccacttggaataccagactccagtccaactttttctttctctttgtttgtttgtttgtttgttttggagacagcagctgtcacttaccaggagctttgtcagtaggtagactggttgatgagcagaccatgcctcgcctgtctctgcctttccaacattgagattataaatacctggtttttcttttgagttttgtgaactaaatctgatcctcagcttaaagtcaaacattaggcagccacttagccttagctttataacttttaattgaaatttctatcagtcaaaatgttagcaatatagtcagtaatagatgggacgtatacaactcacgtaaatatttttactgttaatatatgggggagataggaagtggaagattatagaccattccataatcttgaaacagtaatttcccccaaaaaacaccaataaaaaaacttacataaagaatataaaattgtcttgatatttttccatctcatacatcctaattagtggatcaaatttttacaggaacaacatttggataagaaggagtaaagaaattcctgtaataaaaagagttttcttagtttaactcatgttacatgactgcaaccagaggcctattatcttggattcaagaaatgtaaaataactccacaggtatcatcagcagaagaaactgtagaatggaattgaagatcagacatacagagatccacaggaccttagacactaagtcactaatgcatgttataataaagtgattttggtaatgaaaactctcagaaaatacactttgttttgaaaagataaaggcccaaaacaggatctttcccagaagctgtgttgctttggcctgtcacagaagccttttttcagtagtccacactctctcctgtgtaaactactttccatggagtcccggaaccaagatggctccagcagatcctgaggcaaaggcctcccaggctgggtggacacctgtcctctggccgggaaggtggctggttgtctggagcctgaaaacagcgctgacccagaagctctgtggctctcacctgtcccagaagctgcaagcctctgtagtccacactctcacctgtgcagactgccctcagaggagtcccgctcattgtacattctaagtgtgctctttgtataattttttttctaaggtatataactaacaagtatttctcccatcttgtggtttgccatagtttccctttctggacaaacagaatctttttagtttcatgagattctatttgtagattgttagtcttcaatctttaggtaatagggttctattcagaaaatcctaccttgtgtatgtaagttggagtacattccctatttttttcctccagtagtttaaatgcaataggtattacgttgagatctgccttacttagctttgactgtcaacttgacacagcttacaatcttctgagaggaattgcctagatcagatagacttgcagtcttttgtgaggactgccttgattgtttttatttttttcctttatttctattagatatgttcgttatttacatttcaaatgctatcccgaaagttctctataccttccccccagcatgctcccctactcactcactcccacttcttggccctggcattcccctgtactggggcatataaagtttgcaagaccaagaggcctctgttcccaatgatggcctactaggccatcttttactacatatgcagctagagacatgagctcaggaggtactggttagttcatattgttgttccacctacagggttgcagaccccttcagctccttgggtactttctctagctcctccattgggggccctgtattccatcctatagatgactgtgagcatccacttctgtatatgccaggtactggcatagcctcacacgagacagctatatcagggtcctgtcagcaaaatcttgctggcatatgcaatagtgtctgggtttggtggctgattatgggatggatccccgggtggggtacccagggacggagtcacagagacaaagtttggaactaagataaaaggatggaccatccagagactgctttgattgttagtggttgtaaaacactaggccagggaatacaacaccattcctttgacatgtggcttgaggctgcacaagaacactgaacatgggtctgactctccatagtttctgctggatgttcttgtttgtacttaagtgcctcaatccaaaacagagtggcaagcaggcctgccctgtgtcctgtcttgactttcttgagtaatgaatattgatttaaaaatgtaagctcaatacccagcctcaaaccccaagctgcatatagttagaggggcattgtcataccaacagaagcaagctaaaataaagtcacttacctattcacaatcaaattttgcagagagggagagataggtattcaggtttgtttgttcttaaggtgaactattgatttctgagctctatctcctataaatgttgatttacttctccaatgtacacttttggagtatttttctaagataaagtacctgcacttgcacaaaattatcatcttaatttacgtatttatttttttattttattaaatatagatatttttcacacaaaatatgctgattacagtttccctcccctcgacattcccagtcttgaaacttcccatcccatttagatccattccatttccttctcattatgaaaagaacagtcttcttagggataataataaaatattattagatacaacaaaaactatcaaatcacaacaggacaagataaacaaacagaaagaaaagagcccaagaaaagacacaagaatcagagacctaccagttcacatattcaggaatggcaaaaaacatgctaaactgaagaccataatatatatgcagatcctatgcatgctgcttctgccactgttggtttataaacccttgttttgggggattccttttttctgtctatgtcttactttctttctgcttcctcttctttagggttctttgatccccaaaaaaggtatttatttgatggagacatccaacttactgttgaatatttaaaggtcttttactctctgatattatatttctctgaatctctgcatttgttcacatctgctgcaagagcaagcttctctgatagtggctgagcatagataggttcctggctatctagtctgtggttctttgtcaaccaaggagtgttgggaatcatttgcacttcatctagtggggcttgaataagatattggctgcttattcctataatctttctgataccaatgcactaggataacttgcaggaggggcaccattgtacatcaaaaggtaatgactgggttcctctttatgtttctcctttggtaacgtacagaacacctacttgtactaaagatgcttgaacatataggtaaaggaactatgtaggcaagagtttagtaactccattttcacaagttgtttaggtgttgtcttctgaaataggtagggtcttgctttcagtgtgtggaaagtaacctatagtatttacaatagcctagaatattgggggagactcctaggacctttttggttaaaatctgattagatctgacctaaccccaatatgagcagcttcctttggtgataagagttgcacagttggggtttttgtctcccccattatctggttatttctgttagattgcctgaaatacattttgttggaggggacacttctactgtattaggtatttatactaccccctcaaatgtgtctcctcatatcctccccttgttaaaatgaattgtattttctagtgttttgttaaaaaggaagggtacttgagaaatataaagaatatttttgtattatgtgtaaggatgaatcttagtataccaagaatattatcaattatcatttatttgtataaaggagttttcaggaaaagttattttccatacatctttcttttttttttctaattgcaaatgtattatattgccacaaggaaatcacattgactgtagtacagaatgaagaaattatataaccaccatttggcattaaactcttaaattgtactcatgattcactgttttatttaatgattccaaaattgttgagacagtacttttagttacaagtccaagacctgaaggtgagattcaaccatagaatttgaatcactttaactgtgttttatattgaaatttacatatgattttgtctaagaaactacatagacaagaatataaattggatcatttcataattagttattttgacttaaagaactgatcgtcaaggagctagaggtatgtctaaatgggacaacacctttctagcatgtgcaggagccatgggcttgatcaaatatgaagaagggaaggggtggagaatggggtgaattagcaaagtggtacagtctggagacagtggcagaggtagtgatcgaatgtgagaatgtgtgaggttctgtggaaaggaatggaagaacggaagagtggggagaaagaagaggaaatatgggatgttagaatataaaattcagagagagggaagaggaaagagaggagattagaatataaggtgttgaaaaatggaaaaagagatatggaagattagaataaattctattgagagggcagaagtgacgtatggcaagtcaaaagaagaaaggaaagaaaggaaggaaggaaggaaggaaggaaggaaggaaggaaggaaggaaggaagaaagaaagaaagaaagaaagaaagaaagaaagaaagaaagaaagaaagaaagaaagaaagaaagaaagaagggaagaagggaagaaggaaagaaagaaagagaaagaatgagtgaaagaaagagaagaaagaaagaaaaaagacaaagaggagagagataaaaagcagcagggatgtgcttatctctctgtataaacaacatatctagaaataaatgttttctacaaacctaatatttagaaaactaaaagttattgactacagttgtgtgaccactaagagtttattgttagtggtattagaacttaaataaagattatagacatcaatttcaccctacacatacttcaaaaacataataagagaagttgctatacactttggacaatgcaatgtctatgacagatggaatgtaaaacaggtcgtaattaatatttggtgcattttcctgtataaacagtattgaaaataagacagtggagaaggggaggctcaaagacccctttacctacaaatgtccagtaaaggaaaacagcctgttttatagtggattcagagtttgtaagctaaatatctcccaccccagacacatgtgacaaaagaaaatccaactggccatagttgcaattctttacccaagttttatcatagactgttgatctagattcacttgtttgtaacattgagttatgtaatttttaatgatctgtttttatttttagttgtgtgagtgtgtgcatatgtttttgcataaggatttgcgggtgcctccacagtccagaatggggcatcacattcattaaagctggagttacagtgatttgtcaaccatcaatcatgggtgatgggaaactggggtattttacaagagcagcaagtgctcttaatcttggagccatacctctagtgctgtaattggtttttaatatcattttattgcatatccctttgaaaaatctgtgcataccagtacataattatgtgaaattactttgttatgaagtcatctcaactgatgattcaagactataaacatggaaattaaacatcttttaaagtccctctttcaaaatgcactgtgcatcaggtatttatacatgtcctgtattctctcctcataacctcggtagctccatttccaaccagcactgtatggtttatttcctcttttacagaactccttttcttttttccaattaggtgatccatgcatatgctgtatctcctggtagaatacttatcattgcaattcatgtaattaactgcttctttccattcaggctcagcattaactccagtatatcagaaaattcttttgtgactttttctaccttatctcccaatctatattcagttaaaagcttgtaacttctattcatttctgattttcatatattccaaacattttgagactcataaaatcagaggtaaactagaatgacaaattcctgaactagagagatatcagtcacaaatttaggtggaaagactaaattcattagttttgcagaatttctgagcatggaaagttaaggattggccatgtcagtggaatttacatcgttccaatagggagaggagacacccacacacaatctaatttattgtttagatgcacaaaagacaggcatagaggattctcagtgaagtaaacagccctttaacagtttgatgacatgttgatataaagacagtaatattctggatcactatatgtcataacagtacatacattgaagatgctattcaatgctattttaataaaatggaaatatgctcaaaatttttgtcagtttgatatatctgacaacctgttacaagtagaccttgacactatattttacctaagatttcccacttttttgattttaaataatataaaaatatgacccgcttcaaagtttgtcatcaaacttaacattatgttatgcctcatcagtttcaataatttcttctgacatttgtaaatattgtgtcccttccattgcttatctactagttcacttaatgttacatctcacagaacagaagagtttttgtgttttttatttttttgaggggagcatttttgttttgtttgtttttgttttgttttgttttgttttaatgacagccatttagtggcatccatttctttctttcaagaattaaattctgaagttcaacattaatgtacagttttgtaggcttttccagtgttgttttctatgactttcatagttttgggtgtgtgtctgtctctaagtatgtatttttgtgtttctttttgtgtgtgagtactatttatttggattaatattttattaacattttgaagtgtctcaggtctgtattcaaattaacagttttgcctgagggcatacaaatttcgtcagcatcatttattaagagtattctttatctgtgtcaacttccctttactcatttgacaaagatcatttctgtgtgtatgtgtgtatgtgtgtgtgtgagtgtgtgtgtgtgtgtgtgtgtgtgtgtgtgttgtctgtgtgtgtctatgtgtgttagaaatttctgattttatgtatttgtcccttttcatgttcaatcatattattttcatcactccagctttgtagtgaaccctgatgttggaatttttcttcacgtttaatattgtggtagttcttcttgtcatgtaaaattttaagtggtttgtcaccatcctccagctaacttcctggcctttgaatgagactgctctgtgtcagtcggtcaagcaggaaggtgcttaacctttgactacacaatgtgtcccaattcatcttttaaaaatacggtttcatagaatgtcataaattctttctgatagttggggttttacgaaattattttatagatctttaggattttaaagtggtcacactgtgaataaaacactttaaaatatcctgggcccaccaaatataaaaaatgaagcttatcatgagaaagttaagaaactgaaaaacagatgagaaacagcccaatacagtaatatcatatttagattttagtttttaattttgctccatcattccttatatccttccctctcttcctctctctttttcttcttttctgcctagataagagaggacacgtttatcaataaagcatgaaggcttatcatttatttttaaaagtaagaattataaaaaaatcatataatatttatagtccttggaaggacagagctggtcacaattctcaaaggcattaactactatggatctttgttaagatataaagtgtgaaattcattgccacagactagatagtggtggggagatagtagcacctacttattaacataaaagttccatgccattacatctatctgtctgtctgtctgtctgtctatcaatatcgaaatacatgtggatgggggcacaaatacacttgtcagcttctttagttctatttaaacaaagtagcaagtttcgatattctgggagctctcagaggtaatctgctaacaccttcagtctgccatctcactcttgtaaagcttttcagtttagtgacatgcaaaatgtactcagaagaaatactgacctgatacatcctcattagcagaatcacatgattaaacagattattctaatggcagaactctcaccaaaggacacaaggaaaattgatttgctttgacatgtgtttggctaacctgtcaaaaaccaaagcagtagcaaatgtgcagttgtggtgcatagcatcttcacaaagcaagttgtctctgactaatgagaggcaggctacactctaggagtctgattgtctcaatccaaaatgtccaatgtcctctcctgacccatattcacaaaatatactatagataatgaggattaaagttatgttacagcactttaatctaggatacgaaatgtggatgtcaaatgagcctaagatttcagaatgctagtaccacctagcagaacaacaattgtgaagtttgtgacctacaacatagtactgtgttggcattcggaaccataaaccaaaagtctttttttctttgcttaaatgcagtgttatgcaaagaatgtcttttaataatccatcttccactaaagagatcctattttgtatttctcagaaaaacacaagttgttatctgtatttatggattaaagagtttgaaacaaaactgtgcacaaaaatgtgaagccgcatttgaaagcagtactgtcactcagacagttccccttgcttatatatgtctcttgatgaacattgtgggattaggtaaacacctactagttagttgaggaggagcaggagaggtgtgcagtaacactgagccccaatcaatcactccacatatggttgaataatattacatttcagaaacactttctgaaaaagaaaaaaaaagtgcaggtctgcaaaataccagggtcatgatggggtgtatcatcatttttgaaagtctacttgtaatagcatgctacaaggtatcagcttgttttttaaaaattatttctttgttatgtaattacctcaatgtaggtacatcctcaagcttcaaatgttgattccaatatatctttaagtctgtattacaatcatgcttgtatagaaatatttttggtggttacatcaccttgcatatgtttttactctgtccttctttctaagtattttacttagaaaattgaaccacataggagagatcagagattgatcctgtgatgagagtgtgcttgcctacaataaacaaagccctagcctctatcccagtactgccactcaggacatctgtcttcccaggactcaagaggtagaggaaggaagatttaaaatttaaggtcatatttaactatataatgagctgaagtccatcctgggctccatgaggttctcccttaaaatatatatactgaaccttgcacaattgtcattattaacaactttaacctcagaaatcaatactttacaaagttcaacctataagaactaatatagacagacagtgtttgatatctcaactgattgtaactgttagattcatcataaaatatgaaacattcttaaggaaagacaaatatggaccatttttattaataatccacacttccagctatatctgtgaatgtgttgcgacaatttcgccagtaagactatcctgattcattattaacatatattatgttcatttgcaagaccaatatattcagcttatatagactatactttcttgaactcctcttttaaagtaacacatctaaggatatatgttttctagacttgtttcacaaaattcaccttctataatatgatttagtctaattattttctagtccttgtttcaattatttacccagaaaaacagataagtgcaatattaaaatgaacagcctgggtcaggatgataacacagcaggtaaggacacttcccacaaaactggatgatttgagtttgagccagggaacccagaaaatgaaaagacaaactcacttctacaagtttctcattgtcttctacatgtatatcatgtcatgaacactgttccctgattcacacacacagaataaatatttaaagtattcattggatataatatttctattttcttgaacctgtgtatttgattttatcctaatactttcctggatttcagtggccagttttctaaaaattcaaatcttcattaagtttttgagaagtatcagcctcaaagccttgactgcttactttatgatacagttacccttcatattagcattcttcacttctctaatgttgaccaggatgttatgaatggaaacacggattaaaatagtagtatttcatttttacatatccattattatttcctcagaacattttattttggataaaggccttttatactctgagaccaatattcatgaggttttagattttaaaatgcattcttctagcagtaatttagtttcagacttctgatacctacacagatattttcaaatttcctgcaacacaatacaaataattgtcaacttaaagtttattcgataacctatttacacctcatttaatcataaataagaaggtcttacccattgtgcttgtttcttaagattgctatgacaaataacagacttcatgacttggaacaaaagatatgtattttctcagtcgtttaaaatcagatttctaaatcagcttggtaggagctagtttttctgaagacttgattgaaggaagccattgtttctccaactgctatgttttgcttatgttgtgtttgaataatttgactctgtcttaattttcagaaggctttccccatgtttttctttttttctgtaaatactgtccgactctgtggattggggctaaccaaatcagcccaggaccgtgtcattttctttttttcttaaaacattttcttctcattgtttcctctttctcatatcctcccagatccatatgatcttattctttacttggttatatctataaatttttaatttttttatttattaggtattttcttcatttacatttccaatgctatcccaaaagtcccccataccctaccccctcactcccctacacacccattcccacttcttggccctggcgttcccctgtactgaggcatataaagtttgcaagaccaatgggcctctctttccaatgatggctgactaggccatctactgatacatatgcagctagagacatgagctccggggggtactggttagttcatattattgttccacctatatggttgcagacccctttagctccttgggtactttctctagctcctccattggaagccctgtcatctatccaatagctgactgtgagcatccacttctgtgtttgctaggccccagcatagtctcacaagagacagctatatcaggatcctttcatcaaaatcttgctagtgctttcaaataagttctcattaatgaatcccaagagtttggactggagcatgccttattttattatgtcttttttttttaacacaattcaacccaaggtattattaatgagcccaatatttgtatgtatcaggaacaacaatgttctttttatttggtaactagttatgagaattgcacttcaattgattcgttttgttttatttttgtttttgtttttgtttttgtttttgttttcgagacagggtttctctgtgtagccctagctttcctggaactcactctgtagaccaggctggcctcgaactcagaaatctgcctgcctctgcctcccaagtgctgggattaaaggcatgctccaccaccacccggcttcaactgattgttaatggaatggaaaagcaagaaatcattgaagttaatacagagtaatcactgagtaatgcccccccccccccagcaatacacagacttccaatgatttctaagccagtcacgcatcattgaaggaatggctaaaaaagttaaagaaatttaattaaatttggatataatttgaaagaaatgaacaccttctgttgtacatgggccatataggaattggttttggctcgtgtttatactcaagttttgcagcattgtattggggcagtctagagtaaaacacagtgcttaacaaagaaacaagtctaataatatttcatttcttttacttacaaactcaactcgcattaggtaaaacattcaatatagtagcattaattttgtgttttcacagaactatatgaaattccttaaatgattcatggatttgtaacaatggacctaaatggaagaatatgtactttttcagaagttgcttatgcaatacattttgacaatcatagtcacatcaactcattaaaattaaaactttttaataattaaagtactcatagtatatttaatttgcctcctctgttactcataaagtcgtccaccatctgaaatagtgaggtgtcttttaatgtgtagcagatgcctttgcttaaagcaatggcgatcttgctgttaaaccttcactaaagcctagattgcagtttccttcttcttagagataaactcatcctattttcagatctacaggttccacccctccagcccatttatgtctgcaatattgagcatttctttctttgcattgtgagtttgcaggcttctcttcttctgcagtactcagtggtggaattgatcaaatcaaataaaacaaaacaaagcaacaaaaatgtgctatattcagaagatggcctttgacaaatcatgagcatgattatttcacggctttattttaaatcattttgtcttgattaacatctcccaggtcgactagaaacattcttctgttttgctcatcccacaattgcagtgctgaatataaacacttaataaatattgactttctaatacaatggagataaatgataaatatacatattcaacaaaggcacaaaatatatatttgaaaacaaagaatagttgtaaggataatttgaacattaactgctggtaaatgctattctgatagctgtgcaaactttatgtaaactctgctatttactgtgcatctagaaaattccctcttgacccagaaacagactcttcaacaccaacagacattgcatagcaattatagcagggatttaagtacaagcaaaaggtccttttcccatgggaagaagcttgaactgactgctatatggattatttctttttaccctttctttttaaattttgtattgtcctatattaaaagcaagtagaaagtttgctgttcattgctttatctctagagttgagataagcatgtattgaaggcatgtgtctgactcaagaaagcaaatgtggggaaagacagatggacaacagatgtagggattgggagttctgtacattaaccgtttagtattggtcatggatttcttccgtgattgtcctcatatgtttagatttgagcagctcaattacttaacagacataaaataactatatattctcacacattcaaataaaccacacgttatatcaattattatttaaattatctttagatcatttatgatccacaaatacaaatatatttaacttactctgttacttaatggataacaacaaacatgggtacagagtcattatatatgcaacctatttttaaatacagttgatccacatttgctcactctacagaaatacatccaatggatactaataacaaccacatttatatgtatttgcctagtttttgatactataattattttttcttttggttttaatggtatcttagttgctgtataattcacatataaaaatcaaaaccatgccagtaatggaggcctagaatgcaaaaatgcagtctacattccaagtccttatactgggttactaaagtggtattctgtgtgatttcctgccttcctcttttgctctcctatttcctgctctcagtaaaatgacagtcgccttgtataagaagcaaagtagagataaacacttcacccctacactaaccagtgggtttcattaagtgatggcactttttccacattctatatttcctcatggtacatgatgttgcagatgcctctcacctcatatgtgtctggtactctgtattagaaaaacaggattagaatggctgaggagtttcctatttcaaatgaaatataaataattaagaccagttgctagattaattctagattacttaggttttttttaatgcatttatgaactgagctctgtgtgatgaatatttaaattttaaacggttaacaaaggcatgaagagcagacatacggtcatcgtgttgcacatcgatcttttctccacatttacaaacacaaatttaaaaggtgaccacctaaatgtttgaaggaacacggcctagaatgagaattctgggtccttccattcatattcattacaacttctaattcattaccatatttaccactaaaattgcagagcaaattatattctgtatcagtccccaaaggggttttcatctttcttgtttggctcttcaccaaaacagtatacattaaagagagggattgtactgtcggttgtgaataattaacatgatatagaagttggtactttgtaaaatgaatactgcttaggtttccaatgacaaatcatacccatacttctcattttgtacttctgtgcatggagaggtattatcctaaagaaacagtaacagtaaaactaggaaaaatatcttctcattgctagtccccacgttggtgattctgccttcctctctgtcctcaacaagagcaacaagaagatagaacttggcctggtaatcttttgtcttttggtttaaagaaattaagaaatgataatagtctataatattctctggaaattaacaaagcaaatgaataattttgcaagcatatttatctaagtactaactttgtaagatttaccagaagaaaaatcctttccctatagtaatagaaatccatcctattcttcgagttttaaaagatagctgaaggaaggccaaagtgtgaatgcttcaattctacatagatgtcagaacaaaataatcataggaagtagaaggtggaagccctgggagggagagaggaggaggaggagggaaaagggggacaggatcaggtatgggaagggacaggggagaagtacagagggtcaagaaattgaatagagagtctgaacaggttagagggtgcgccagagaaccggacagcttctggaacgggcagaagcacagagccgctgaggcagcacccttggcgggccgcagacagccggccaccatccggaccagaggacaggtgtccgcctggcttgggaggcggcctcagcctcagcagcagcggtcgccatcttggttccgggactcaacagaacttaggaaattagtctgaacaggttagagggtgcgccagagaaccggacagcttctggaacgggcagaaacacagagccgctgaggcagtaccctttgcaggctgcagacagccggccaccgtccggaccagaggacaggtgtctgcctggcttgggaggcggcttcagcctcaggagcagcggtcgccatcttggttccaggactccctggaacttaggaatttagtctgcacaggtgagagtctgcaccacagaagctgacagcttctgggaactgccaaagcaacacagcttctgagagaggccctgttttgggccttcttcttccaccaggaggaggtccaaaaacaagatatctgcgcaccttccctgtaagagagcttgccagcagagagtgctctgagcactgaaactcagagaagagaatctgactcccaggtctgctgagagaaggtaacagaatcaccaaaagaacaatctctaaacagagtcaactataactactaactccagagattaccagatggcgaaaggtaaacgtaggaatcctactaacaggaaccaagaccactcaccatcatcagaacccagcactcccacttcgcccagtccagggcaccccaacacacccgaaaacctagacctagatttaaaagcatatctcatgatgatggtagaggacatcaagaaggactttaataaatcacttaaagaaatacaggagaacactgctaaagagttacaagtccttaaagaaaaacaggaaaacacaatcaaacaggtagaagtccttacagaaaaagaggaaaaaacatacaaacaggtgatggaaatgaacaaaaccatactagacctaaaaagggaagtagacacaataaagaaaactcaaagtgaggcaacactggagatagaaaccctaggaaagaaatctggaaccatagatgccagcatcagcaacagaataagagatggaagagagaatctcaggtgcagaagattccatagagaacatcggcacaacaatcaaagaaaatggaaaatgcaaaaagaccctaactcaaaatatccaggaaatccaggacacaatgagaagaccaaacctacggataataggagtggatgagaatgaatattttcaactcaaaggaccagcaaacatcttcaacaaaattattgaagaaaacttcccaaatataaagaaagagatacctatgaacatacaagaagcatacagaactccaaatagactggaccagaaaagaaattcctcccgacacataataatcagaacaacaaatgcactaaataaagatagaatactaaaagcggtaagggaaaaaggtcaagtaacatacaaaggcaagcctatcagaattacaccagatttttcaccagagactatgaaagccagaagagcctggacagatgttatacagacactaagagaacacaaattccagcccaggctactatacccagccaaactctcaattaccannnnnnnnnnnnnnnnnnnnnnnnnnnnnnnnnnnnnnnnnnnnnnnnnnnnnnnnnnnnnnnnnnnnnnnnnnnnnnnnnnnnnnnnnnnnnnnnnnnnnnnnnnnnnnnnnnnnnnnnnnnnnnnnnnnnnnnnnnnnnnnnnnnnnnnnnnnnnnnnnnnnnnnnnnnnnnnnnnnnnnnnnnnnnnnnnnnnnnnnnnnnnnnnnnnnnnnnnnnnnnnnnnnnnnnnnnnnnnnnnnnnnnnnnnnnnnnnnnnnnnnnnnnnnnnnnnnnnnnnnnnnnnnnnnnnnnnnnnnnnnnnnnnnnnnnnnnnnnnnnnnnnnnnnnnnnnnnnnnnnnnnnnnnnnnnnnnnnnnnnnnnnnnnnnnnnnnnnnnnnnnnnnnnnnnnnnnnnnnnnnnnnnnnnnnnnnnnnnnnnnnnnnnnnnnnnnnnnnnnnnnnnnnnnnnnnnnnnnnnnnnnnnnnnnnnnnnnnnnnnnnnnnnnnnnnnnnnnnnnnnnnnnnnnnnnnnnnnnnnnnnnnnnnnnnnnnnnnnnnnnnnnnnnnnnnnnnnnnnnnnnnnnnnnnnnnnnnnnnnnnnnnnnnnnnnnnnnnnnnnnnnnnnnnnnnnnnnnnnnnnnnnnnnnnnnnnnnnnnnnnnnnnnnnnnnnnnnnnnnnnnnnnnnnnnnnnnnnnnnnnnnnnnnnnnnnnnnnnnnnnnnnnnnnnnnnnnnnnnnnnnnnnnnnnnnnnnnnnnnnnnnnnnnnnnnnnnnnnnnnnnnnnnnnnnnnnnnnnnnnnnnnnnnnnnnnnnnnnnnnnnnnnnnnnnnnnnnnnnnnnnnnnnnnnnnnnnnnnnnnnnnnnnnnnnnnnnnnnnnnnnnnnnnnnnnnnnnnnnnnnnnnnnnnnnnnnnnnnnnnnnnnnnnnnnnnnnnnnnnnnnnnnnnnnnnnnnnnnnnnnnnnnnnnnnnnnnnnnnnnnnnnnnnnnnnnnnnnnnnnnnnnnnnnnnnnnnnnnnnnnnnnnnnnnnnnnnnnnnnnnnnnnnnnnnnnnnnnnnnnnnnnnnnnnnnnnnnnnnnnnnnnnnnnnnnnnnnnnnnnnnnnnnnnnnnnnnnnnnnnnnnnnnnnnnnnnnnnnnnnnnnnnnnnnnnnnnnnnnnnnnnnnnnnnnnnnnnnnnnnnnnnnnnnnnnnnnnnnnnnnnnnnnnnnnnnnnnnnnnnnnnnnnnnnnnnnnnnnnnnnnnnnnnnnnnnnnnnnnnnnnnnnnnnnnnnnnnnnnnnnnnnnnnnnnnnnnnnnnnnnnnnnnnnnnnnnnnnnnnnnnnnnnnnnnnnnnnnnnnnnnnnnnnnnnnnnnnnnnnnnnnnnnnnnnnnnnnnnnnnnnnnnnnnnnnnnnnnnnnnnnnnnnnnnnnnnnnnnnnnnnnnnnnnnnnnnnnnnnnnnnnnnnnnnnnnnnnnnnnnnnnnnnnnnnnnnnnnnnnnnnnnnnnnnnnnnnnnnnnnnnnnnnnnnnnnnnnnnnnnnnnnnnnnnnnnnnnnnnnnnnnnnnnnnnnnnnnnnnnnnnnnnnnnnnnnnnnnnnnnnnnnnnnnnnnnnnnnnnnnnnnnnnnnnnnnnnnnnnnnnnnnnnnnnnnnnnnnnnnnnnnnnnnnnnnnnnnnnnnnnnnnnnnnnnnnnnnnnnnnnnnnnnnnnnnnnnnnnnnnnnnnnnnnnnnnnnnnnnnnnnnnnnnnnnnnnnnnnnnnnnnnnnnnnnnnnnnnnnnnnnnnnnnnnnnnnnnnnnnnnnnnnnnnnnnnnnnnnnnnnnnnnnnnnnnnnnnnnnnnnnnnnnnnnnnnnnnnnnnnnnnnnnnnnnnnnnnnnnnnnnnnnnnnnnnnnnnnnnnnnnnnnnnnnnnnnnnnnnnnnnnnnnnnnnnnnnnnnnnnnnnnnnnnnnnnnnnnnnnnnnnnnnnnnnnnnnnnnnnnnnnnnnnnnnnnnnnnnnnnnnnnnnnnnnnnnnnnnnnnnnnnnnnnnnnnnnnnnnnnnnnnnnnnnnnnnnnnnnnnnnnnnnnnnnnnnnnnnnnnnnnnnnnnnnnnnnnnnnnnnnnnnnnnnnnnnnnnnnnnnnnnnnnnnnnnnnnnnnnnnnnnnnnnnnnnnnnnnnnnnnnnnnnnnnnnnnnnnnnnnnnnnnnnnnnnnnnnnnnnnnnnnnnnnnnnnnnnnnnnnnnnnnnnnnnnnnnnnnnnnnnnnnnnnnnnnnnnnnnnnnnnnnnnnnnnnnnnnnnnnnnnnnnnnnnnnnnnnnnnnnnnnnnnnnnnnnnnnnnnnnnnnnnnnnnnnnnnnnnnnnnnnnnnnnnnnnnnnnnnnnnnnnnnnnnnnnnnnnnnnnnnnnnnnnnnnnnnnnnnnnnnnnnnnnnnnnnnnnnnnnnnnnnnnnnnnnnnnnnnnnnnnnnnnnnnnnnnnnnnnnnnnnnnnnnnnnnnnnnnnnnnnnnnnnnnnnnnnnnnnnnnnnnnnnnnnnnnnnnnnnnnnnnnnnnnnnnnnnnnnnnnnnnnnnnnnnnnnnnnnnnnnnnnnnnnnnnnnnnnnnnnnnnnnnnnnnnnnnnnnnnnnnnnnnnnnnnnnnnnnnnnnnnnnnnnnnnnnnnnnnnnnnnnnnnnnnnnnnnnnnnnnnnnnnnnnnnnnnnnnnnnnnnnnnnnnnnnnnnnnnnnnnnnnnnnnnnnnnnnnnnnnnnnnnnnnnnnnnnnnnnnnnnnnnnnnnnnnnnnnnnnnnnnnnnnnnnnnnnnnnnnnnnnnnnnnnnnnnnnnnnnnnnnnnnnnnnnnnnnnnnnnnnnnnnnnnnnnnnnnnnnnnnnnnnnnnnnnnnnnnnnnnnnnnnnnnnnnnnnnnnnnnnnnnnnnnnnnnnnnnnnnnnnnnnnnnnnnnnnnnnnnnnnnnnnnnnnnnnnnnnnnnnnnnnnnnnnnnnnnnnnnnnnnnnnnnnnnnnnnnnnnnnnnnnnnnnnnnnnnnnnnnnnnnnnnnnnnnnnnnnnnnnnnnnnnnnnnnnnnnnnnnnnnnnnnnnnnnnnnnnnnnnnnnnnnnnnnnnnnnnnnnnnnnnnnnnnnnnnnnnnnnnnnnnnnnnnnnnnnnnnnnnnnnnnnnnnnnnnnnnnnnnnnnnnnnnnnnnnnnnnnnnnnnnnnnnnnnnnnnnnnnnnnnnnnnnnnnnnnnnnnnnnnnnnnnnnnnnnnnnnnnnnnnnnnnnnnnnnnnnnnnnnnnnnnnnnnnnnnnnnnnnnnnnnnnnnnnnnnnnnnnnnnnnnnnnnnnnnnnnnnnnnnnnnnnnnnnnnnnnnnnnnnnnnnnnnnnnnnnnnnnnnnnnnnnnnnnnnnnnnnnnnnnnnnnnnnnnnnnnnnnnnnnnnnnnnnnnnnnnnnnnnnnnnnnnnnnnnnnnnnnnnnnnnnnnnnnnnnnnnnnnnnnnnnnnnnnnnnnnnnnnnnnnnnnnnnnnnnnnnnnnnnnnnnnnnnnnnnnnnnnnnnnnnnnnnnnnnnnnnnnnnnnnnnnnnnnnnnnnnnnnnnnnnnnnnnnnnnnnnnnnnnnnnnnnnnnnnnnnnnnnnnnnnnnnnnnnnnnnnnnnnnnnnnnnnnnnnnnnnnnnnnnnnnnnnnnnnnnnnnnnnnnnnnnnnnnnnnnnnnnnnnnnnnnnnnnnnnnnnnnnnnnnnnnnnnnnnnnnnnnnnnnnnnnnnnnnnnnnnnnnnnnnnnnnnnnnnnnnnnnnnnnnnnnnnnnnnnnnnnnnnnnnnnnnnnnnnnnnnnnnnnnnnnnnnnnnnnnnnnnnnnnnnnnnnnnnnnnnnnnnnnnnnnnnnnnnnnnnnnnnnnnnnnnnnnnnnnnnnnnnnnnnnnnnnnnnnnnnnnnnnnnnnnnnnnnnnnnnnnnnnnnnnnnnnnnnnnnnnnnnnnnnnnnnnnnnnnnnnnnnnnnnnnnnnnnnnnnnnnnnnnnnnnnnnnnnnnnnnnnnnnnnnnnnnnnnnnnnnnnnnnnnnnnnnnnnnnnnnnnnnnnnnnnnnnnnnnnnnnnnnnnnnnnnnnnnnnnnnnnnnnnnnnnnnnnnnnnnnnnnnnnnnnnnnnnnnnnnnnnnnnnnnnnnnnnnnnnnnnnnnnnnnnnnnnnnnnnnnnnnnnnnnnnnnnnnnnnnnnnnnnnnnnnnnnnnnnnnnnnnnnnnnnnnnnnnnnnnnnnnnnnnnnnnnnnnnnnnnnnnnnnnnnnnnnnnnnnnnnnnnnnnnnnnnnnnnnnnnnnnnnnnnnnnnnnnnnnnnnnnnnnnnnnnnnnnnnnnnnnnnnnnnnnnnnnnnnnnnnnnnnnnnnnnnnnnnnnnnnnnnnnnnnnnnnnnnnnnnnnnnnnnnnnnnnnnnnnnnnnnnnnnnnnnnnnnnnnnnnnnnnnnnnnnnnnnnnnnnnnnnnnnnnnnnnnnnnnnnnnnnnnnnnnnnnnnnnnnnnnnnnnnnnnnnnnnnnnnnnnnnnnnnnnnnnnnnnnnnnnnnnnnnnnnnnnnnnnnnnnnnnnnnnnnttggagcttctgcttcagccttccaaacactcgcctttgggaagcagccttaggacccatttgctgagctgtgagatcaacatggcatgtggtttagatgttctagtcatcaggcccagtttcaggctctgtcaaccaccaaatcctagcagctttttgcgtgtactgtcgtccttaggtgcagtgttctttgaactctgcagcctgagccagactctgactgagttcctaagggtttccaagtgagaatataacttgctaaggtggcttaatccacaaaacagaaaaaaaaaaaaaaaaaagaaattgaatagaaatatgtaccagtgggggatggggaactgggaatagccactagaaagtctctgatgccagggaagcaagaggctcccaggacccaatagagatgacttcagctgaaatattcaacaaaggggagatagaacctgtaaagaatacctccagtagataggttcggcttctggttgagggatggctccacccatccatctcaaaaattttaactcagaattgttcctgtccaaaggaaagccagggacaaaaaatgaaaccaactgaaggagaggccatctagagagcaccccacctaagaatctatcccatctgcagacactactgctgataccaagaagcatttgctgagaaaagcctgatatggctgtctcttgagaggctatgccagcgcctgaaataaagatgtagatactcagagccaaccataggactgagcctggggactcctatggaagagctaggggaagcactgaaggagctgatggggattgcaaccccataagaagaacaataccacctaactagaccacccagagttcccagagactaaaccaccaacaaaaagtatacatggagtgatcaataggtctagatacatctgtagaagaagatgactttatctggcatcagagggaggggaggcccatggttctgtagaggcttgatgtcccagcataggggaatgctagagctgtaaggcaggagtgggcaagtgggttgaggagcgccctcatagaggcaaaggggaggggggacaggggcaataggatagagtgcttgtggaagggaaaccaggaagcaggatatcatttgaaatgtaaacagataaaatggtgaataataaaaaaatatggggaagcatgaagtaaaaaaataaaaaagtctaaaatataaagaatcccactcaaatttgtgtagaataagctcaaaagttggcagaatatggtattataccaatgacatctgaaatatggtcaggcaacccaattagagaaattgagagtagtaatatgggataaaagttttaagcagagtctttgctttcaagttttaaaataataagtttatagtttagtgctaggcaccagggaagtgattatgcaaatacataaatgtacaagattctatttttgctttcatgattatataattgatacatcatgagaagacttaaaatgtttgatattaattgcactgaaaagtacacacatgaattaactaattccaaaatgccatgtgcatcttcaaggaaagttcatacatatcctaagttttctgtattaatgttatacatttaatattgtaggatccacttgtgaaactagatgaatgtattgaattacagcaaaagtgatttatacttttccttatgagtaaagcaagctagtgaggcaataaggaaccctgtggtctctgcttcagttcctacctccaagtatctgctttgattttgtgtgttggctccccatgtaatagactataacatgtaaggcacatagattcattattccccaagttcatttagtcatgttttttttatcatggaaataaaactagaatactgatgtttaaagtgttgtgaaaaggtgcctctgtcagttaggtgtcactgaacacaggaaaagagtggtgtgtagtgagagcctgcatcttctgtcctattctcatttcagacagagtttttttttagctttttactatctttcattttatggatatcagaagattatatttcaaaaaaaaaaggactgtttttgtatgtagactatatctatctgactcttctgggtttagacatgaatgcaagtacataataaaaagtagtaaagaccagtgctttgagttcctagtgcctgcatttccactatgaagcataaggaaaatgcacatctagaaattcttgaacacattgtagcagcagagacatacaggaaacagtgctaatattttttcttggcccataaattactcaagaaatgacatgattgtagagaggtagaaaaaaagaggaaagacagaaacaaagacagaaacagaatcagagacagaaagagacatagaaagagagacatagagacagagatgaacacatacacacatatacacacagagacacacaaacacacacacacagacagacagagggaggttttctttccaattctctaattcttaaaattcttaattatcaaattatcattgaccttcttgttggttcataattttctcactcatactacagaaagatttgcaacacaagtgtaatagcttattgtatcacaatgtctacatcaagaatggacaggtaattgacagaatttttataggaagaacagattacttgaaacagtaatgcaatgtgcaatggcacaaattgaaattcattagtcttctggattatttaagtatgatagcttgggtttgtttgtattttaaaaagatatgcacaatatataatatattaatcctttacatacttctccctttttccccacatttttttattcgatattttcttcagttacatttcaaatgctatcccgcaagtcccctatacccttcccccaacctgctcctctacccatctactcccacttcttggccctggtgttcccctgtactgggacatataaagtttgctagaccaaggggcatctcttcccaatgatacttctcccgtattactgagagatgaagcaagttttaaacacggatcttttaagaaaactagcccatacgtgaaaactacctttgtccaggataatgtaaacaagtgaaaacagagtactgtctcaagagaaattcacactctgcctggaaacaagcaagcaaacaaaggcctctgcactattaaaaatgtgctaaccaattaagagttctaaatacaagttgctctaacaatctaaatgagggtgtgaaactagatttatgatgtcagcaatggagagttgatcttcgttgtcaacatgacacatagaaacttatatgaagttagaagatagaaactcaactaaataattgtctaattttctccaccagattggcctgtgcacatgtctgtagtgtgttctattgactttaactgagaaggaacttagccttgagccagtttgcactattcctcctagggcttgcattaagcttctgccttggctttattcagtgacagactgtgttatgagagcctaaactgatataaatattttcatttgctgattgccttcagttggtgtatactattggagaaaaagaaaatctaaagcaatggttaatgcctaccatgcttcttcttcttcttcttcttcttcttcttcttcttcttcttcttcttcttcttcttcttcttcttcttcttcttcttctttaatatgcctagtttgcaaaaggatcaccataaggtatagccaaaatttagaactttctctaattctgttatttttttaaaaaaagcagactccttatgaattcagaaatttaaatcaacaacaaagaaggttgttttgcctcagacattttacttatggacttgggcaaccagatcatccatttcatctttgtttcccctctctgtaaaagatggacagaaatctgtatcctaattatgaactacaatgcaatttgctccataaagtttatcacttatatttaatctagcattatcttgcaagtatacagttttcaggtagtagatattaggtggcctttcataagggccaagaccctttctcaaggatgctgttgttcatcagaattgttttacctaactttcatctctttttctcagtctttctacaactgttcttttgattttcagtgagatcggaaatcagcagcttaccatgttataacatcactaatagttaggaaatgtgtagtttaaatcaaagattataggacagaaaagcttagttctctgtaagtatctcctttctggccattagttctggtactttctggtataaggaacactactatctcaaactattataagattctgtttaaaaaataatgtgaattcaagattttatctggtatagtacaaagatgtagggagaatttcctttaaaaagagtttggctctgggcaatatttcaggatttctatccataaccctatcaggcaataatggagtagacagaaaggggctgaagaaaaattctttttcttaaatttacaatatttaatatgctttataacttactaccagagctgggcttttttaatcaaggaaaataaagttcacttccaagtttaccagtgaagatcttttcccctgtattttaccatgctaggaatttccaggcctttttgccatggtcctacacccctccacattttcgactcttttctttttactttttttccaattttattagatattttcttcatttaaatttcaaatgctatcctgaaagtcccctataccctccccactgccctgctcccctacccacccactcccacttcttggccctggcattccccggtactagagtatatacagtttgcaagaccaatgggcctctcttcctagtggtggccaactaggccatcttttgctacatttgaagctagagacatgagctctggaggtactggttagttcatattgttgttccacctatagggttgtagaccccttcagctccttgggaactttctctagatcctccattgggggccctgtgttccatccaatagatcactgtgagcatccacttctgtatttgccaagcactggcatagcctcacaggaggcagctagatcagggtcctttcagcaaaatcttgctggcatatgcaagagtgtctgtgtttggtggctgattatgggatggaatccctggtggggtagtctctgggtggtccatccttttgtcttagctccaaactttgtctctgcaattccttccattagtattttgttccctatgctaaggaggaatgaagtatccacatattggtcttccttcttcttgattttcttgagttttgcaaattgtatcttgggtattttaagtgtctgggctaatatacacttatcagtgagtgcatatcatgtgtgttctttgtgattagggtacctcactcaggatgatatcctccagatacatagatttgaccaagaatttcataaactgattgtttttaatagcagagtagtactccattgtgtaaatgtaccacattttctatatccattcctctgatgagggacatctgggttctttccatcttctggcaacaaatggtgctggcacaattggaggttatcatgtagaagaattagaattgatccattcttatctccttgagcaaagctcaagtctaagtggatcaaagacctccacataaaaccagagacactgaaatttatagaggagaaagtgggggaaagccttgaagatatgggcaaaggggaaaaattcctgaacagaacagcaatggcttgttctgtaagatcaagaatcgacaaatgggacctcataacattgcaaagcttctgtaaggcaaaacacactgtcaacaagacaaaaaggccaccaacagtttgggaaagtatctttaccaatcctaaatctgatgcaggactaataaccaatatatacaaagaactcaaaaagctggactccagaaattcgactgttttctttgaaatactcttttaccagggttttcaggctggacttgaactctagtctggaaaagcctggctctgtctccagagtagctgaggaatgcaggcctgtgctggctgtactgtcaagtctgccttggccttttaccttcaagaagcacatgtgacatcatgtgatgccacagctttgtcaggagtcaatagcattttcatagctatgcaagagtgttcatcagcaatggattcatcattgctcacttacatcaataactgcacagcacaacagtttgactattatttttcaagaggcatgtatattaataaaattgaatgtaaatgagtcaatagattcagtattatgtggagcacagctttggacacaacttcttttcttgcacaatcaagacacgttcatacaattgtttctctttagactgcagctcataaggtagtttcagctaaccccactaaccagaaaaagcaacgtatatctctgaaagaaaaggaagaaatggttgtggaggggtaactgggaagggggatatcatttgaaatgtaaatgaataaaaggattttaaaaagaaagaacgaaaaagaaggaatggaatatgaaaagcattattataagtaagaatctcaggtaaccaatagagcaaagaacatacctgatgcacgttttctacaactgactatattcatgtgtttttaaagatataaaataaaagcaagcacacacactaacataccccagaagtataaccacttcaatgcattaaaaacaaaaactcttgttcaacaattttaaaaaaaatattattttgtttctagtatttacatgattctgatgcattgattcaagaaattgtaagaaaatcttcacatctcatttagattcggtgttatgtagtcacataatgcttattaagacttctgtgaaaggaatgtctttgaaacagttactatcccacaggattaaataatgatctatgcatttgtataaatttttccaatctcatgacttattaaaatgcatagctactttatgaataatctgggtaaaaatgaatatttttgaaagttcaagttacaatctttagtttgcttttaatattcgttctatgtcaaaaagaatgagatcaacatggaagagaccagtaaagggactagagtgaatttctttgtggcatatcagtgctaatctaatcaaatagaccttttgacaattcaaaattattgtctaattaaaatattagtctatgggaattttatcacttctaatttaataagaatttttatatatcattctcttttagttacttcatttgtatccttttgatgtattataaaaacaagtttaagagggactttgttgtcttaataatacagaggagtgactgagcaatttgatcattggattgtggtggctgtatttatctttagctagctttaggagagttgagattcaaatccatacccaacttattacacaaaatttactgttacctttcctttcccattttatactccaagtacttagtaaaacaatgaaaacacagttggtactcatgtacacattgtttgtctttaaaatttaattttaatctctgagcatttcttgtactaatatacactcatctttctcttctatgcactttctttaccattttagtttgcttgttcatttgttgattgtaagagtgtgatagtatattcgttgggaatattttatttttacattaaatataaaaataaatattttatgtatttacattccaaagttgctccccttcctggacccctccccaagttctttaccccagcccaactccagatagggtgctcccccacctgctcccccaccacccacatcacccccaccagcatccctctccctgaggcatcaagtttccacaggattaagtgcagcctttcccactgaagccagacaagacaattctctgctacacatgcgcccaggatcacagagcagcccatggatgctccttggtcggtggcttcgtctctgggtgccctgaggggtctgggttagttgatactgttgttcttcctatggaatgcagtccccctcagctccttcagtccttcagccaactcttccacaggggtcaccaacctcgatctaatggttggatttaaatagctgcatttgactcagtccactgctggtttagcctctcaggtcaatcacattcctgtctgcaaggagaatatggcatcagtaacagcatcagggtttggtgtacccacctgggatggatctgaagttgaattggtcactgggtggtctttctttcagtctctgctctatttttggccctgcatttccctttagacagtaacaactctgggtcaaaaattttgaagatgaagggtggtcctctgcctcaactgggggccatgcctatcgactggaggtggtttcttcaggttccatctctgtctagtatttcagctaatgtcatccccattgagtgctgctagcctcacacatcctagggctgagactttcttgaggttccccctcccatactgctgcatatttcacttcattgccctagccctctggggttctctcctgtcttcccaatgcttgctcctgggacccttttccctcccctctcccaaatcccactcagcttccttccttcctttgcctcccatgattatttggttctaagagggtgtggggtactcacacgtgtaccttccttcttcttaatctttctaaggtatgtagggggtatcatgagtattctgaaatttttggctaatatccacttatcagtgagtacataatatgcatgtccttttgaatctgggttacctcactcaggataatgttttctagttccatccatttgcctgcaaaattcatgatgtcctcattttaagtaggtgaataatttttcattgtgtaaataaaccacattttctgtatccattcttcagttgagtgacatctgggttgtttccagcttctagctattacaaataaggctgctatgaataaagtagagcatgcatccttgcggtacggtggagaatcttttgatatgataatgtattagtattgtatgatattagcttggaatgttttaaagctaaagaaagatgtagtatattcaaaaatattcaggagaccatcatatctttttatattttttctcactatgatgaagactttcttgccaggtctatatttctatagacctagatgagataggatgaagagcataaggttgaacataaaacattttcaaattagcatattgaatcttcatatttctttccattactaaaaaagtattatttatgtgcccattataaactgtaagtgaaagctgaagaatgcaagagcacccaaacaaaccaaaaccctgttttctcagaagtagtgaacaccctgaactagtctttaaacaagattgtttaaatttttgtttcatacttgagtgtttgtcttttgatattctctagtgatcactgtgcagtgacaccaatgtgaaggcagtaattcctcctctagggactgaaaattggtgactgagtcatattatataatattaaatgatattcaatgacaaaagtaagtttgaggaaaaatggtgttctgcagatggacagtggatactgatgaagcaaaactcttttatgttctcattcttttttccaaacaaaaatgtgccagaattccgctatcagttataaatactataagcacagaggctggagatgaagatgagaatctgtattgctacttataaactacttacagaataccaaaaaagagaatgtaaaacaataaataacatgtatacatagaatttctgttcttatgaatattacattttgaaggaatcatagcataaaaaaggaattatatttaatgtacagtacttagtagtataaatacagatttttgaagagataaaacacaatatgcatttagaaaataaatatgagaaaataggaacttgccatctcacaattctctatattcttaagcattcaacttgaccttgaaagttggctaaatttttggcaggtttaaataaagcctgaatcccttctacttgtgaatcttctacaatgctaaatattctgaggttttcagtgtactttcaacgtctaccaatgaattaggattatttttataggaagtacattttgtgtaagattgaagttctaactgatatttatggattatgtcaaattggtaacaataaatcctaatagaaattatgagattgttattagtacatttgggaattttagtcaatcactatggttggacaatcaatatttttagattatactaaggactggaatattgaagagaagtggctacagaaaggattgctacattcagatgcagaccaaaagggcctaaaactgagtggagctggatatcactgtataaagctttcaaagcaaggaatactcaatattatagttgtgtacttcaagtatcagaacatctaatacccactaggtgccagaaaatgaagagcttagtcaattggatactaattttatattattttccctcacctctgaaaatgaacactaaaggaaaacctataagataaaccttatatgtgatagcggtgttggaaatcaaacccaaggcatggtagaagttgtgtaagtgcactgcctctcagatacacccagtaggccaccatgacactttccaaagactggtccctacttacttaagttcacatgttaggtccttatttctaattaaaataactgcattattctagcccaaaacaggagattaatgttgatctaaaaaaattaggctgctgaataaaatatataaatagctgtcttttagttcttgtgttgtctgaagtacctttaatgtatctgcataactatcattgaataaaagggcttctagctcagttgctttaatatcacaatgagaaatggcagagctgttaagaaatactagacatgcattgaaaaagaatggtacttttggaagatattcacaatcaggagtattagttacagtattatcatgtgtcatgcatttctgtataaattttagaaataaatatttgattgaaacctgagataggtgagatttacctgattaataggtcttaaaatatacagaaatccaaaatgagcactcaagcctgtcttcaagactctgtcctctttattaagatggcataattcattctataatagagcaacatatggttgagtgtaaaataaatggagaaaaggtaaaataataatacagttatattaaactaaatgtcctcctttgaagcctatttagctaatactccaagaaacagtaaatgctatatctagagtcttcaagtacaaaatctgtagagataatattttctctttgcaaaggagaaagaactttaataactttgtcttcacctacatgataatcctaatttataattatcagtatcatcttgctccttcaaataactttccttttcgggaagcagaatgagaagcctgctttccttgctttgagaactgtttatttttgttcctaagctgagaaaatcttttgagagcaactcatgtttattgatagcaaatatagtttgaggatgaaaccccagctcagaagcaagcttacttttaacttataaaaagtttatacttttagcttataaaaagtgatgtagtcttacctgaggtgtctttcatggtaaaaggtgagatttcattttttttaactgggattgccaaaacatttgaatatgacttctgtagatatatgagtgaccaaacaatcacctcttccatgaatactttgaatcaaagtgaaagccatgtgtcaataaataaccatgttgacaaatgactttattgactgctaaagcaaagctaatgtcctggaaagcaattaacaaaaggtaacatttagtaaaattattattatatatgctgtattttaaaaacatcttaagaaaaaatgtttaatacatattctgatctataagaatactccaagatgtatttttaaattatttactttatatgcatgtgcatgagtctgagtatgtatttgcaccatgtgcatgcagtgctagtggaagtcagatgtcaggatcaactggagcagggaactgtgagccacccctggtgtgaaggagggggaactgaacacctaagtctgcttccagaacatcagatgctcaaaacatcaaagcaatttctccaggacctccaagaaatattaaaaggaaaatgttcttggtgtctgtatgctctgaaattattagcacgctgttttatttttttattgtattttgctttggtctcctgatgtcacgtatctggaaaaggttagactagaaaaggtaaacacagaaaacctggaaaggactttaccataaagcactaacatgggagattctgatttttcactattggaacagcatacttttatgtgtagttgtttataaaataaataataaccctaagatatattactcacatctgagccatgtgtgtcattgatagttcaggtaaaattaaatttgcaaaaatgtatattagaatacagattaagttacaattcaccaatattgaaactaaaattagaagattcagtagcttggattatagtctacatgcctcattcttgaatataaattaaatgtgttgatactatggttcaaatttgtgcatatactccatatttagtctatacttcatactgagactttgaataaggcaaaaggtctcaaggttgcatggattgtacatttcaatgaatgaaaataaacaagaaacctggacttacagactgtcaaagtgatgtgtgatcctatgaagaataaaatagggccatcacaacataggggaaattttaggtaatgtgactaaggctcttctgatttaggattttatttttactagtttactttagattttatatcccaatcatctctgcctcatagttacccttcaaagaatctcccctcccatcccctctctcattcttctgtaagaatggtggccttcctgggtaccccacaccctgccacatcaagtctctaaaggattaggctcatctttgcccactgacaccagacaaggcagctctgttgggaaatggattccacaagcagggaacagctttagggacatccccaatgccagttgttagaggaactataggtagattgagctgcatatctgctacctgtgtgtgtgtgtgtgtgtgtgtgtgtgtgtgtgtgtgtgtgtgtgtgtgtgtgtgtgtgtagggggtggggcgctcactccagtctgtatatggtttgtggctcaggctctgatagcttccaagggtctagattaattgactctgttggtgtatttatggagttcctacccccttcaagacctttaatccttatcccaccatcccatggcagtcccagacttctatccaatgtttgcctgtgagtatctgcatttgtttcagtcacctgtttggtggagcctcttagagaacagctatgctaggctcctatctgcaagcatggcagtatcattaatagaatcagggattgatgcttacctatggaatggagctgccaaccaaccagaggacaatttctagggtagcacacaaagtaccttcaggcaaagggctgaggatgttcattctgtgtgataggaaactaaatacattggggtgcaaattttaacagctcctgtttgggctatggtttccatttgctctctcagtccaggatttcatgctcaataacactctgtagatacaaaacctggtagtgacagaagaaacatacccagaagaagcatgtttttagcagagaaaatgtttaggaaaaatatcctgagtcaaaataaaactaaatagaaagaaatattttagaaaggcgtctggcatcttgggagcagtatgaacagtggtaaaggttaggttatccatctatctgtctgtctatctgtctgtctgtctgcttgttggcattatctctgtttttaattattgcacattcaatatgcatatcagttcctttatcatacgttcttgtatgtataatgcatttttatcatattcgttctctattgaattctcttagcttcatagtactactgcagacccaatgttctcctgtccactttacactttcaggtctgttcctggtgtgtcaaaggtttatagtatagttgaatacaggagcacaaaggaaggactgcatataagagtataggtaccttctagcgactacatcactaaagaaaatcttccacctacagcaaagatgtgaaaggttgaatgaaaaatgagaccaagtattattcttctaaatattaggatgcaataaatcactaagaattaatagcctcataggcctggtgaggtcagcacactgcagattattcattgttagggaactgtagagcagtggtatttataaaaataatacctgatctgatttttccattcagaaagtcatatattcattcagaaagttcactgaatgaaatatgagaatattggtcaataggcaactgtgcctctcctgtgtgagagattggatctgtgtctaaaacaaaagcaatttgttatctttataaatattgcttttctagttgtagttttttaatcagataactttgagtaagttaccaatcaaatgaaactgtgggaaggtcattagttgctcacagaaccaaaaagaggtgacagaggcaggtttagaatgaagaacggctgtgatgagagtggaaagattgctaagaatcagctgaggaaggggtgatctcatgacaggcagattttgttcagagcatgagtttggagtggatggaatccaattatcttcagatttgggttcattttctctttttgtccccttcagctccagacttcaagacagaaatatccaatagtcctatattgcattctgggtaatctcttcagctgagctagtaccagaaggaatctagcagtcagcaggaagatgagtgcatgtggagcagacggttccctacttactgtaatatgttagaaaatgctaagcatataagatgcagtcacctaattttttttttttgcagtttgggaaagctacatatatacacatatgtaatattctagacgtaagggttacctgaaatgaaatctatatttaagtagaaaacccaggtgcttataaatatgtgtgtgaagaaagatacagacacaggaagatttagtgctggtggctgcattatattatactcagggttagaaaaataagttccaaccattccagattcagcaatcctttctttaagagctcttataacaattccttaaagaacctatagccctattaatatgctgtttagtctatgaaaaactacaatgaatcaaactaagtattcaaaattataattaaattttaattagtaatttttaacaaaatatgtatttcagaatctacatttccaggcacagtcactaaaaaaaaaaaaatgccatatactttcacttgttcccagactcaagcacaagcaggcacacatgtattactcttgtttgtgtggctgagctgatgatgttattttccagagtcatgaacagattttaatacacactgagcaaacaaagttcaatttccccttaggtagcatgttcatgtactgcaacatttatattaaccctgacatttgaaagtagtagtttcctatcacagtgacaacacagaagcctcacatttatatgagatgaggtgagattataacctttgtaagactgagtgaccataaggatagattggagacaagcagatttgctttattaattgtgtagacttgggaaagaatctgcaaggtatgaagagtaaatatcctctgatatataaccaaagcctatgaaatcaaatatagagatagatttgaagactattcaatatagtgatcatttggatacaaagctgagggaaaaggaaatattggaatttggaaaacctacttatatttttcagtctagcagtggctggcatcagctgtaaagtgagaggcaatatacaacaataagaagaaacagtaagcattctttgtaacatatagtgtgaagtgcagttatgctgggtagttgcttgaactcttggtgtggagttcgggaggatgatctttgctgaagatacagactttattcagggtaacaaaatgcaaataggaaaaagaacagggactcgaggtctcttacaaacagcaaatatacattagggaattagcatattcttttctattataagctatcttggaaccatatatgaacatccccacaagtacccagagtgtaaatgtgtctgtgatctttaaacactaaagagacttatatatcattgcatcatgaccacagcacatgtgattcttcattacatggacatcagttcaaccctcatttaatcttggaagtaacttcagttcacatcttagctctttctaatattacttggataagttgggtcagacctagagaactcagttttctcaaactaaaatcaggatataatatccaaatctcaagatgtttcagattaacatgaataaaggtatccatgaagctgagagccctttttaatataagaggtgacctgagcatatgaaaaacttgggacagaagactgtagagagtcctgctcatattattctgcagagccttgaaaaatgcttcaagtaggaaggcctgcagctatttaggcaacaggcacaattggtaagaccaccatggatagtgccattactgtcattaatgggtgtgattaacaaggtaatccgaggaaagccttttggcaagaagaatgggtaagctgaaaaaacacatgaaagatccatggttggggaatgaatttgcttgatatctgggtacataactttggcattgtcttaaatataccattaatttactattaaacacacacatacacacacacactgagagagagagagagagagagaacctagaagaaattgagttcttgaaaacaattgaaaatgcttattccactatttttcattcttttttaaaaatctttttctttttttaattttttattagatattttctttatttacataataaaggaatcccctttcctagtttcccctctgaaattcccctatctcctcccccttccccctgctccccaacccacccactcccgttcctagtcctgccattcccctatactggggcatagaccctttacgggaccaggggcctctcctcccattgatgactgactaggcaatcctctgctacatatatagctagagccacaagctccactatgtgttttctttgattggtggtatggagtactactcaacaattaaaaacaatgactttatgaaattcttaggcaaatggatggatctggagtatattatcctgagtgaggtaacccaaacaaaaaaaacaaacaaacaaacaaaaaaaaaaacctcacatgatatgcactcactgatattagtggatattagcccagaaacttaggatatccaagatacaatttgcaaaacacatgaaactcaagaagaaggaagacaaaagtgtagatacttcactccttcttagaatgggaataaaatacccatggatggagtttcagagacaacatctgtagcagagcctgaaggaatgactctccagagactgccccacttgggaatctaccccactattcttcattcttacaatttattttcctttgcagtttcaaatttatgaaaataattattcataaattattataaaataataattattttaccctctttatcctcttttatgtccctcccttttccactgagccttttgcttcctcctagtaattttctttgtagttttttgaatttttttccctatcagttttcaaaacacacctttggaataaaactcatagaaaatctttgaggaccgagcatgtgtttcagagcacagctaccgcttaaaaggcacatggccctggctccaaactctagcattccaatagtagacgttcttctttctgaaactgaaatgactctgataatctttgcgaggaatgggaataaatctacgcccaactgaggacactgctctccctagggtcagaaagaggaactgaagaaggtcacttagctataagccccatcattgtgcagaggatcccttggtacaacacttgattggcttatgttcacacaggagggtgcattgggactcacagagactagaatgtgaaagaaaagaaaaatctaaaggacacatttctttcctaaatgaagtacatatcttgagtcttaatttaaagtaccaatttgtagtaataaaaacagatgtattatccaaaagttgactgactatattaggaactttattcatacttttaggttcctgccaaatataaaccattgatgaagagaacagataagagagaagacacggggggggggggggagagagagagagagagagagagagagagagagagagagagaaaacagtgatactaatgtatcagagaggaggcagagaggaggaggagggtcttgccaccatttacttgttctctagattctggcaaccctctaggatgctgcctgtgactcctcagaagctctgcctacaagtttcaaagacagtgatacatcagctacactgtaattgaaaactcaaacgatattagcccttccctttcttaattaaaataataattgtgatacccagaccatgaaaaaggcaggctaccttctcccacaacatgttattacataaagaaagagaatgagatttaatgagtcctattgcttttgacctaattaaattctcaatctccgacatcttagcttccacctggcctctgtagctcataaatacttactaggatctgctcattgacagggccactgaagaaaatgggtttcttgccctagatgtgtattatgattgacagtgtaatcttcagggatgctgtggtgtcaggaacgccatgagatatgcaacagctctgcgttccttaccagacctctcttaattatgatggatatagagttgcaggtatcaggatgcaggtttgtgacagatggaggtagctctttttttttcctgaaaatttagaatagaaatccatcccagtgcactccaatatcctggtgctaataagcattagactcattttttgaaacatggggttaacctgtatgtgtgtgaacatgcctgagtactcatgtgcagtagcaaaataaactttatgttgctgtgcaataaggcagagaaaaatctttaaaacagttgtttcctcaagtataatacttaccatatcaggaattttgctctgtattattttcgtatgtgttttttatagtggcagcttctttatttcagacaggcctcacagccattcttttagtctgggtagcctctgtctactgagagttgggataacaatcgtgagtcactttgtctgactgctgacttttttttttattattcttgatgagtaacaagacttaacaaagaggtatgtaaaagcactcaactctatttgacaaataaatgcactagaactatattccataaccacttttatcatataaagcaccacatatacattccaaaaagacttttagttttttaattaagacctagaaatttttgaaaatttagggaagatgataagacaattccttaaggcacatatgcaatatatagcacctataagaaaaaagaccaccccacaagtgaaacatgattgatattattttgtaaaaaaaatgttacaggtgggagaatgactgagacacaatcatggcacatcaataagtacaaatttagtaaaacacttatctgatcataatttctcttaaacagagaaattagagttcctgaatgaataccagtgatactcagtatacttctggtaaaggtggggtatatttaaaaaggattttcattgaataggattggtggttcaatttgctcacaagagtaccaactattcattctataaatttaaaatatcccactgttgactttctatttattgtcttttacctttactcattgaaagaggattcaaaaaaaaaaaaactttaacaaggttaagtgattcgttctgagtgattttccccaataggatgcatgatgttttaaaatttatcaacaatcttggatggtactgacttatatatggtgtgattttttcactcaacactaactatagacattatcatgaacagaattccatctagacattatcattaacagaattccatctgaagtacaaaaattatctcaagaaaacctttttgtagtatacatgatttatatgctttttcacaaaaaagtttgtgttagatttatgatatagttatagaagttcaaatgttattaaagaatctgccccactccctcaaaaaaaaacaaacaaaaggagaatgtgatggtttgaataagtatggcccccattcatgtgtttgaatgcttggactcagggactggctctattgagagatgtggacttgttggagtaggttaggtcttataggaggatgtatgccaccgaggaagtgggctttgaggtcataattgctcatagtatgccagtgtaacaagcagtcctcttctgctgcctgttggtaaaaatgtagaattctcagcaacttttctagctccaaatctgcctacatgctgccatgcttcccaccatgataacaatggattaaacctttgaacctatcagccaggcccaattaaatgttttcctttgtaagaattgccatggtcattttgtcctattgacagtgtcctttgccttacagaagcttttcaattttatgaggtctcacttatcaattcttgatcttagagcctaagccattggtgttctgttcaggaaatgttcccctgtgcccatgtgctcaaggttctttctcactttcttctctagaagtttcagtgtatctggttttatgtggaggtccttgatccacatgaacttgagctttttacacagagataagaatggattgatctgcctctttgtacatgctaaccgacggttgaatcagtgccatttgtttaaaatgctatcttttttcccctggatggtcttagctcctttgtcaaataccaagtgaccatatgtgtgtgggttccttactgggtcttcagttctattccattgatcttcctgcctgactctgtaccaataccatacagttttaatcactattgctctgtaatacagcttgatataatgccttttgatcattaccaatagttaacaagtacatttatatatttgaaaataaaatcttgatgtttacctggatttctacaaggtgacaggttcaaattatactaaaataaaatacctcctatatgtatattacaatttaaacctacaatatgtgctttgagatttaccttttaacacaaatctatatcttagtaatgcttcatatttacctcttcagcatatagtcagaattccttttggtactttagggttcttttacatgatttaccaagtgctggtcttatatccaaatataagatatgctacttttatggcagtaagacagacatcagaagggcagctcattcatttctaacaattttccttaagcaggttgcagagagactgcaaggcaatggatgcggaccatacagcaggtctcattttctctaacacagactttgcaatatatttcatatatgaataaatgaacttgtatacccagtgaaagttttattttaaccctcatttggtatcaagtacattgtaaaatagtatacacagtatggtttgtagatgataagtactagcctcgttgacatttatttttgttgcatttttgagttatttggcttgatttcaggaatattgttagattcttcttttaaaagtttggtgaacagttctctgagagttatcatagataacaggtagttcagttggttaatttagagttgtaaggtattataggtggcatgagactatgcagcagatatcaaataatatctaatatctctctgggagggaacattgatttaaaaatattactaacttatataggaaagatgaaaagaaaatacaggttctatgtattacatgaaggtgtaattaacctacaaaacaatatgactactgaccactgatatgtgtatattagtgataatccttatagaagatacaatttgaggttaaactgttcaaaatatatttggaaatcactcaatatgttgtatctttcacataagtgactggtcagtattttatgttttattttactatataaataactttgcagtgtttagattgctaatggtattagaaattatatcagaaaggaagttagagagcagacaggcatggtcagcctggggaaaacatttaaggatgtcttgatataaaactttcaacaagctggattaagaatatacaatgactgaattttgggatgtttctcaattgtaaggcatgtgtttatggtgcagaaaactgggttcaattccgatctcatgttcccgactctccctaccctacatcccagcacatataaaggggaaaggaagacattaaagtgtgtttaggacttgttgtccatggtaatttgacaagccaggagagttcaccaaagatctcctcgctctacagcctttagacagataatcttaagcaagacagttgactttctagagctagctttcttcatgtataagactaggcagtgctgaaaatgctaacttgagtttctaccttggttttcttctggaaaatacccgaatgagatgcaaaatgccacaagtggctggcagagcacaagtccttcagacttcttggctggggtactactacactgtgtccatggcaatacgtggttgcatactgattgaaagaattagactggtatagtgccactgatattgactcatttatttctggtcctagaattatccaaattgaaggataagtacatgtgtattttttaattatacatgctttatatgtttaatgtgcttgtctgtgcaatgcctgtatcattatcaggtctcactctctcttctcctacttcttagatttttttttataattgacattatgatatgattgcacaggtttcccccaccctttccttcatccaaacccttgcttttacccctcactgctctctttcaaattcatggcctctttttatctcttgactgttgttatgtgcatatgtgaagaacctgcaaacacctattttactaaaccaggatccctaacaacaataaaaacattttcctttatgtccatagttaaatctagcctttaccactcaaaaaggaaacttcttttgggggcatagactattgctgaaaacaacaagtgatcaaaattcagagttgtggagcctttcctgatggctacaactacaaagtaattcccttagttcctgcaacagggtctctcactgatcctggagctcactgtttggcaggacttgctagtcccttgcaaattactgatccacttgtctccatgctccagggtctatacacactcagtctgtgttcatctaaacgcttaaatgtaggtatccctggtttcagagcaaatatactgccctttgcaacactgccagataaggcctatgttttgttattaaatcaaagagaattcacgcaactttgtaatagtttgataatttagaaaacctccctagatatcccactctaaacctaaacattgaaattgttaacttgacctcagctccctgttgtactctaggattccaacactcattatatgactaaaacgatgtagcagatgtgattaaagttattagtcagtagcccttcaagtaaggtctcagagatggtcaggaatgttaagagcaatgaatctgactactgtagggaaaagacagggtaaagacaccaactcagcaagttctcaaccttgcttgtgcattagataaaggtccatgagaaacctgtgccagggacctgtgggtgagcaggctttaggctccagcttcatagacagtgtgtcacagttcaggatgtgaatacatagctggacgtgatgagtttgcaagaaggatggtgatagcaacaggctgctcaacattagacagacaaaaattaattcaaaaccagatgcacagttaacgtgttaacacccacctaaaacacagtcttcaggaggcggaggcagacggagctctgagttcaagttcagcctggtctgtatagcaggttctaaaacattcatgtctacaaagtgagacccaatttaaaaaaaatcaaactaataaacaaaaaatgaacaacaacaacaacaacacccacacacaaaaaaacaaaaacaaaaccaaagtaattctccccaaactaaacacaagactgtattgcagctttggctctgaatggtgaatgtgaacacttgggcctggccttgtgtcacaattttttgatgccaacaaatactgcttgaatctgaacactgaccttgaatcagattcaaggctattcaaatgtggtgaattgcagtatttcatataaagtttttgctcaatagaagctgatgctgtcattatgaaagatgatgagttttaattttaatgttttcatactgctcttcttcagtcttcaaggatcaaattaatgtgtctttgaagtgcactatattagaatatatgattttaaaaactgttgtttcagttgctagctttagttaatgaaaaacataaattttgccttgatactaagaaaaaaagtttcaataacttctgaatgatctttaacctattcctatcattttatgttatgcatttatttgaaaagacattctcagcattgatgattataaaaataacaattaattctgagaaacgctgaagagcttctgtgtcctgaagtgttattcattcatccaggattgcactctttttgtcaaaataaatgagcctctcagttagtatgttgttttcaactacagtaaatggtaaaattatatgtattgcaaaaattgctttaaaatcagttgtgtggtggctttgcaggaagtgtttgacttgtgtacatccatttttttttttacttagttcatgtgtatatgtgttttactcacatgtgtatatctgtgcacggcctgtgtgtcagtgcccggagaagccaaacaagggtgtcagatatcctggaaatggtgtaaagttagttctgagccgccatgtggatactggaaacggaagctgggtcccctggaagagcaagccacagattgatctcttcagactcagtgcactgattatttaatgggtatatgtttcagatcacatgaaaacttattcagtgatatgggtcgttaatgaaaaaaatgtttaaaattatatcatagatgatagtttaaaatgtccaggaaaagaaggcgttattatgaccacagagaactgaaatttactcacaacctggctgtttctcaaagtgggtgggtttgggaaccgtgctgtaatcacagacagctgacacctggagacctagaccctgcagagaactgattttaaccaggcttcccctgttcctcatatgcaaatatctcacgagaagccatcagacaagtgtggcaataagagaatagtgctgcaggccttcaatgtttctctacttgttatgaagctgtgaaaaaggcaactgatgcagttactaaaaggagatgtaaaggttgagcagatttggaaagagccattttctgtacgacaaatgttaactggaccacttattttgccaaatgtgtgtgaagagctgatgaaaaggaccatgtaacgcactgaagacatctaattagacagaagtggaaatcaccattctattgaaacactttttcctgaatcaagagtgattcaccagctgaaaagaccttgaccttctgactgagggaggctgaactactcgtcacaagatttctttccttgaggaaaccaaatccatgtctttcaaatgtagactgctattcttaaaatcataattgcagtcacttttgaatcttaaatttgaggtggtttttatacactatgtcctattgtaaataaaactgctagttacagttttatagatgaagcataattttcacttagaaacctagacgaaaaatagttatataaatcaaattctatttctattcttaattgaaccttagagtaaatggaataaaaatgaaagcaaaataaagtgctacagtcacaatttcaaacttttgaattacatctttcaaggtcaaagttctaaattataacatggctacacaggattttatttaatttatgttataatgagctatgccaggaaaactcggtcccttactttggaaaaaaaatacacacacacacacacacacacacacacacacacacatatatacatatatatatattcaaaagactgtaaaatctaattaactaatttcttttatgaaaacaaacactcacaattatgaatgtatttgcctaaaaatatgccatatatgttttcaatatagaatctcagtgtgtcaacttatttctctctaagactcctttatgtccccttgtggcaagttctgtgataatatttgctagtcagtttgtttttctcatgaagtgataacttcccttgttttaacaccagtcttctggcatcatgtagcctatcacagaagttctgttcatgtcactaacctgtcagctttaaggccatcacagaactcagggaatgaaatgcaggtactaataacgccttctgatttactatggatataaaaatgtattcaacaatgcaaattgtttttatctaaacctggcatttagttatgctcgattggcaaagcttggggatgacaatatacatatacatacatatattcatatgggagattaaaaaataaatattataagatatttaattgtcaactggttgccaaaaattttatagaacagaataaaagtggattaaataatagatgggtaataattaaagtaaattacagatcaggagggaggaacagaagtactgagtatgtttgaaaatcctcatttccaaactttcatgagaaaattattagaaaaaatattagaaaatattagaaaatgatacatttggaaagaaatgaaacaattgctagttatttccaaacacatgcatatcttatatttctatcagtagacagtttttaacagcaactgagacccatgaggaaaatagtatgacacagaaccatatagaacaaaatcaacataaatagacaatgcaaaagaaaataaaaatgtatttttctaagtctatagataattctaagtcacaatatatttatatccaaatattttatgttttttattggagaagaatatttttagaaacaagctccaagtctgttttttaaatataatttttctttattctttgaaaaatgcctatatgttctggtcaaatctatccaccagtgtcttctctcttgaaacctttcagaactcccgtcaacatacttccctttcagcttcatatctcagctccctccctcttctccttccagtttttcctttaaaaattctctcccattgcccccttctcaccagagaaggagaacactcccattgggtaccaccacaccctggggcatttagtctgagcaggactagacacatactttcccattgaggccgaaccaggcagtccaggtagtagagaggtgatccagtgaaggggaacaaagactgagacaccccctcctctacttgttagggaactaacgtgaagactgtcttagttagggttttactgctgttaacagacaccatgaccaatgcaagttttataaatgacaatatctaattgggactggcttacagatccagaggttcagtccattgtcatcaaggcagtaacatgacagcatctaggcaggcatggtacaggaggatctgagggttctacatcttcatctgaaggaagctaggaaatgactggacatcctcatgaggctaggaggaaggctttcaagcccactctcacagtgacacacttaatccatcaaggccacaacttctaatattgccactccctgggacaagcatatgcaaaccatcacaaagaccaagtagcacatttgaaacaaatgagaagggggcctaggtccagctcttatatactccctgtttagtagtctaggctttatgagcccttatgatcctatgttagttgattctttgggtcttcttgtggtttccttgaccccaacaacatcctcacttctattccccattcttccatagactcctcagcctccacctcatgtttggctatgggtctctacatctgccttcatatgcttatagatgaagattctcagaacacggtgattctaggttcttgtcagtaagcataccagaatatcattaatactgtcctggattggctctctctcatgggttgggtctcaagttgaggcagtcattagtttgactgcttcttcaatctttgctccatctttatccctgcccatcttctaggcaagccaaattgtgggtagtttggtgtacccctctctattctgaaagtcctgtctggctacatgaatggttagttcagtctctgtattcctgtctcgtaggaatctcatctaggatcaccctaatagacttcctgtatcctcctgctttctaggccagtcaccagagattacacctgctcactgatttccattctcactcccatccctttcttagccctccatctttccatacctgataaccctactacttcccgcatcaccccctctcttacccagatcactctctccatccacctctcatgatcatttagtttgcccttctgaatgagattcatgcatcctcccttgggaccaacttattacccaatttctttgggtctgtggattgtagcatggttgtcctgcactttattgttaatatccgattacaagtgaatgcataccacatgtgtctctctggctctgggttacctcgggcaggatgatagtctcaacttccatccatttgtctgcaaaagtcatgatgactttgtttttaatagcaaaaatggtccattgtgtagatgtacaatttctttctttctttttaaatttatttttattggctattttatttatttacatttcaattgttatcccctttcccagttttttcttcaaataccccctatcctaaccccctccccctgtttctatgaggatgttccctatccatctacccactcctagctcacactctggcattctgctatactggggcatctagtcttcacagggccaagggcttctcccagtgatgccctataaggccatcctctgctacatgtgcatctggagccatgggtccctccatttgtacagtttagttagtggtttagttcctgggagcttgtgggggtggggttctgtttggttgatattgttgttcttcctatggcgttgcaaaacccttcacctccttcagtcctttctctaactcctccattatggtccccgtgctcagttcaattcttggctgtgaccatccacctctgtatttttcagggtctggcagcacctctcaggagacagaaattcaggctcctgcctgcatgcacttcttggtatccacaactgtgtctgggtttggcaactgtatatgggatgaattgccagtggggaagtttctggatggccttttctttagtctatactccatgctttgtttctgtatttcctaccctgagtatttttttcccccttctaaaaaggatcaaagtacccacacattggtcttccttcttcttgagctttatgtggtctgtgaattgtattttggctattcccagcttttgtgctaatatctacttatcagtgagtgcataccatgtatgttctcttgtgactgagttacctcattcagtatattttctagttccatctatttgcctaagaatttcataaattcattgtttttaatagctgagtactactccattgtgtaaatgtaccacattttctgtatccattcctctgttgaaggacatctgggttttttccagtttatggctattataaataaggcttctatgaatatagtggagcatgtgtccttgttatatgttggagaatctttcgggtatattcccaggagtggtatatctgggtcctcaggtgatactatgcccaattttcagagaaaccttcagactgattttcagagtggttgtaccaacttgtaatcccgccacaatggaggaatgctcctctttctccatattctcaccagtatctgctatcacccgagtttttgccattttctttgtctaattttcagttgagaggcatctagtttgttttcaatttctggtgttacaaaaagatttgctatgaatattgttgagcaagtggtatagtggcctcctttggttatgtaccaagaagtgatataactggatcttgaggtagaacttttccaagttttctgagaaaatatcaaatttatttccaaagtggttgtacaattttgcacaatcaccagcaatggatgagtgtcccccttgttctacatctgtgccagtatatactatcacttgaggttttgatcttatatatcagaagatggaaagatcttctatgcttccatgctcatggatcagtaagataaacatagtgaaaatggccattttaccaaaagcaatctgcagaatcaatgcaattcccatcaaaattccaacacaattctttacaaaccttgaaagagcaattctcaccttcatatagaaaaacaagccaggcaatcgtggcacatgcctttactcctagcacttgggaggcagaggcaggatatctgaattcgaggccagcctggtatacagaatgagttccaggacagccagtgctacacagagaaaccatgtctcaaaaaaccaaaaaagaaaaacaataaaaccaggatgctgtgagtaattttaatatacatgcttctgccatattgctagtttgtcccatgctactggaacagtcagcagctggctgtttttccccaggagctgtgattattccccaagcctttcacagctagctttaccaagctgccaataagtgtgccccgggtgccctctttatcctcctgctggcctcagccccgtggatggaaaacactagaccggtttattattttaaaactagccacataactcaacggctgggcaaagagtttcctctcctgatcttatcagctaactcctgccatctacttggcccccactcaaagtagaggctatatattctaggtgtcccaagacctacttgactgcagcttcctcctcatttcaaggcctggtctgaatcctctcctctgtccctgcatcttttctcttccttctaggacccagaaatccgacctttttccttttgctcagaaattgagcttccaccttttttctcgacacaatcaagaactaattaaggaaactctctctacaccaggaaagcaaagacaatcctgaacaataaaagaacatctgaaggtattaccatccatgatttcaagctgtactacagagaaaatagtaataaaaacgcatgctatttttataggaatagccaggttgatcaatggactctaactgaagaccctgacataaacctatggacacttgatttttgacaaagaaggaaaaaccaaaccaaaaaaaaaatcatcttcaacaaatggggctggtctaactggatgtgtgcatgtagaataatgcaaatagttccatagctatcaccctgcacaaaactcaagtcaaagtgaattaaagacctcaatataaagccgaatacactaaaactaataaaacagaaattgtgtaataatcttaaactcattagtacatgaaaaaaaaatcctgaacagtatacaccaatggcttgggctataagattaacaactgataaatgggacctgatgaaactgaaaaacttgagtaaagcaaacgatgctgtcaataggaaaaaatagcagcctacagattggaaaaggatcattaccaaccctatacccaacagatgggtaagattctaaatgtataaataactcaagaagttagaagtcaacaatccaaataacccaattaaaaaatgggatacaaagctaaacagaattcacaacagaggatttttgaatgactaagaagcccttaaagaaatgttcatactccttatttatcagggaaacacaaattaaaatgaccctaaggtttcatctttccatctttctattaccacttctgaaaagatcccttggtattggatgtaagagttgtgttgttgatttatcagttggaatgtattccataactcataagtcatttaaatatctatcaaccttgcccaattttaagatgagagagaagtaattcctcacagttgaataacttgtaagtcaaatattattgaaatcagaaaactagtaaggaacacactttggcctgatctggactaacttttgctggaacaaggcattgatatagaaacctatcttctttcatatatgctaagcattctattcagtgggctcagaggtgacttctgatagcaaaccatctgtacagagaaaagaccatgcttagctccttcaaagggttctgggtttgaaattgatgagttccagggtttgagagaaattacttccttcaaggttacataagagaagtcagagatttcttactctccacacctagttaggtctcatgccagtattctcggggccagccttgtagtttcatttcatactgacaaggacagattctggaatctgatttcaagtgaatgcaggaataaaaaaatggctggtggtgaattttgatacagtggctgcttcctttcaaacatttaaagtaactgtctgccctcctttctgaatagaaatggcatttttgttgttataataaatggcagagatacaacagggaagatccacaaaataaaattatgataagaaagcaaaggaagaggatacagtagctcgaaatataagtgaatctgcattaagaaaacaaatcagtatgtatgatccataatttgcaatctaatggagttgacattctaagaaatgagaatcacaaagcttaaaagaaagtatttttatacttattgattttaaataaaatatagatgagggaatatgaaaactgcaggaattatctgaacatgtggctttttaacatatcatttcaaccagtcaggatgacattggacaactatagaatattatgactcacatgattgaaaaaaaaatgaggatacaatgggcttcatgtctatcatgtctatttatccagtaggtcattgacagaagattttttcattttctcccatccatatatttatgtttttgttcattgataaaaattactattaaccacaataatgtttggttattgaaaaagagagtgtcattccaacctttcaagagagattgggatgattttagtcacatataaaatcctgagctagctactctgctaaaccttttcctctgggactggctataaagtcccttttctctgaagatgttggtgtctaaagtgtcaaagatttaataatccaatacatgaagcattataaattactgcaatatattaaggaataagaaatacatagactataacatatttcagtttgtgctaagtatattacatggaatgatatatcattgtggttagtttagaaagaaaatcttactccatcatatccctatttactgagcttttattttttatggagacatggtgggaaggtgtgcaaacaattgacatacagagtattccaataactacttttaattatctcagttcaatgaataatgtggaactcaggatttaagttagtatttattctccttttgtttttggtaggttataattaccagcagcttggattactggtacgttaatcattttatgatgctccaagggaatgacagaattaattaatttagaatgagaagagcttatttggcttacatcttgaagattctagtgcaagtccagatgaatcaacttgtttggagttctactggttgttttagatgacagtagcagggaaaccagctcagaccatgcccaggaaacaaagagaagaagcaggttctaggaaccttgatttccctttgagaacatatctttagttctctaacctcacacaagcatccagctcataaagcttccgtggaactgtcagacctcctcttagtacatgacaaaaactctgactctttataaaagaagtagctgatatttattgagtgtaagtaacagcatggcagtaggcattgatccggccagtatccagcccagaaaatcttatcaagacaggtacacataactgctgcacacattttgcaagatcagtgagtgtgcaaacaactcctctgaggcacattactctataatctgaatttctaacgattactctgtgctggcatgttatatagcactgaaggttatgaaactggtgtgtcagcagagaccataaaatcagtttaatctcttttatcattatactcttttataggatgataggtctaaaatataggaagacattgagcctggttctaaagcaggatgaataattggattttaagaagattagtggaatacacaacaagaagaaaaaaaatatgtaacatgaaaatgtaggcagacagaggggataagaaagataaaatgtccataaaagaaagaaagaaaaaatcttgaagtaggacttgctattataccatcttcatactaataaacaaacaaatacgcaagacaagttcttcatgccagtagaatgagggagggtcattgccactgaatgttaaatcatcaggtagtatataaagtctttcctatcatactggataatttcgttttaatacctgtatgtttcgaggcaacacttagggtaaggaataatattagcaagtctaaatgaactctttggttaacagtcacaaaacagggaaatggaggagatgagttatacatgatatctatgattctttacaaagaactggaacctggatacatgtgcttaagactattcttatggccttatcttacaagctccacatttgctcatttagttcaccatcatttaataaatgatttattctagttgataaaatacctattaggaattatttcattacctctacaatgcgttttcctgagtttagacaggtcatttaacttctacatgccaaaatatattttctagtgaagtaactacaaatggatgactttatcgttaagttattaataatacttaaaaagaacatgtgacataaattttgcatcctaatttaaaaatgcagtaaagggagctaaatttatctttataaagttattatagtataactaaagcacttacattaacctgcataaaattataaaatagtatttagactttctcatatttctttaatctactcttattcatttttaataacatgagagagaagcctgatgggtaattgtttctttgaatttcaacaatgaatatgggtcatgtgcaaaaattaaacaaaataaaacactgcgaatcacagactaagcttgtggctctaggtgttacagcactgcaaactgatttttcagtggatcatattttcttatgggatttccaaatcacataattaaacatgatggtcacgtgataacagcttttgtggagctgaggcatgaagattgtgggtttcaggccacataatgaaatgctttatctgatatgaacaagtaaaattattcctgaatcatatcatagtttttctctggttgtcatgaagaatctgacaggttgaactagagaaagcttcaagttcagaatggtcctcacctcaggcattggttcccaggatctgtagtaatgagttcctttgcctgctcacttgacaacagtgaatgaaatacctggtcagaggattctggtaaaaatgatgtcctgatactccactatttacatcatcattttaagtttatatgcagtctacttacagagccaaaaaaatatatatttaaagtcatgtacgggatgttttacaaggcaggtggaaaacggcttgaaagttattcagagttgcatttcaaattttagttccatcttaaagcagaaaatatttggtatccatgtcaatacataaaggaacaaacataatgttggtgattttactgatggtagttttcttctgactcctacaaattcttacttacttcactctcactggtttctatgaatactttagtaagattttctcattttaaacctaagctaaaaaaaacacacaaggatttaataataatgactaacatttatgattacttgtgagctaaatatttttctaacacttagggaattagttacttgaacttatattaactttggaaagtgttataattcggggaggaagggtagctgaagaaactgagccacagagcttgttcacaacttgagggtcttcctttagattttacaaaagacttattgaagagtcaagatttgaaccctggcaatatcactccataattccagcctctacccctatatagttctcttcagaaagataataactgtaactcagagacatttattcttttatatgtttagtgagacatgatagtgacaattgtcaaaatattcattactggattttaacatgtgatatgagccccaaaccatatcttagggaagacatggagcctggtcagtgctcagggcagacaaaacatcttcattcttttacaactctgactttgcgttaactcacacgctcagtgatatgtctagcctttcagattaagactgtggtcatctgaaatgctacagtcttccaatttgaaagatctgagaaaggaaatgtattaataggaaaggagagtgatgtgaagtaatatacagcatggcttaaaggccatttggaaattagtacatctaaacacagttaaacagagaaggagaaaccaaggttgcaacatgctatgaagcaatggtcagaacaagagcacactttgtcagccttgtcatgctttccaaaggtgctctcataagacaaacaccaaggagctcagaatagactcttgactttgaaatgatttacaaaattctaataaggagttcatacactactcgttatttataatttctgtatattccatgaagttgccacagaaaccctgtcatcctacactgcacttcatttcagatttgacagtaggaatgtgggagagagggtatgttaaaaccagaaaaggggataacatttgaaatgtaaagaagatatctaattaaaaataaaaaaaaaaactattctcacggttgacttatgtaaaatggaaatattccatgtgcaatccccttttctctgactgttaccctccaaagaccaaccaatgtatttttgaaagtatccagggcctgttacccacatgtatattaaggaaaacagctagagagcatcatctgctcttccaattttccagccttcttaggtggtcctttcaaatttttgtggtggacaagtgatgctcctcagtgggtactgatccctgtgccagttcatgaggatgcacacactggtgttacagtcacagcaggctatcttaacctcatgttggacgtgggccacatcaatttatgaggtcacattgtccataaggacttgctgttatctatgcccaacaaaattctattctacttgagaccctggaccccatccataaaatttcattggatttcctgttggtttctagattgtcttctctggctgatctggaagatatattcgagcaagtttttaaagtccagaatgtatcttgttggtatgcaagatattttagtttaggcttaagctggttatgtctatcgctccttcctttgagatgtgttttgtgctgttgaatatgaataggctttggatggaccatctcagaacttaaacacacacaccagcatgagctgagcctggaagttttgtttcacaagcacatcatatgctattgattatgtgtactatgtgtacttaaatgaaaatacacatcaagtgtttggctagcatctgaatttttttctctcaattctcttggtgttgtaaaaacaacagacagaaatcaaaacaacataaaaatatctaggtatgcttacaaacacacacacacacatttcagtgtttgatccctttgagagtggtgtatcagctgagctcttaaaatgtagtttgtttttttttttttttaagtgaaagaaatgggggcagattttagggaactttacccataaggatttcaggttgtgtctcctattgttgctgacacacgtgggaaaagatcgggatttgtacaagtgtggcctctctcccagactctgaagtcctgcacaaagtcagttcggaaagagattctccgcagcagcaaactgcactgtctattcatatttctcttccacctgcccccacaatggcgcctgtttgtgcagcccacatgcaacaaggctgtgtttgtaagtaagggtccattcactggctgtctatttagaagccttgacagaaaaccccatgaaaagctcttccattcaaatttatctttaatgacttgctccattcagtatagatggtaggcagggggagggtcctggggcttggattctcccactatgtcagaaaagaaagcatttctataaagccctctgacgtgctgtggttattaaacaacaggttatagcaaaaaaaaaaaatgactaggaggagaaattatttcaggtgtaaaaattttttcccctttgcaggcaacactcctccacatcctgttcttttctctctctctctctctctctctctctctctctctctctctctctctctctctctatgacttaacattacttactttctttcaacaaaagtaatccccttcccttccaagagatctgactacccatccagtgtcacaggatttcccctcagacactgttaacctcctgaaagtctctttcattgtacacattagtgtcgtccaacatttcttttgtttcgtaatttattatttgtatgcgtggacattccatcatgtacatatgaatatagggcaatttgtggtctctgtgctcttctgagtttgtatggattctgggtagtggtctcagatcactaagtgtgtaaggcaagtactttgacctgcagggtcatctcaccacagtccctcaccgttttagagatgaactactataaatttaataagaaaatgtttaaatgaacccaagagtgggggtgttttcaaatgagaaatacccctcactatcattttaaataaaggttgttaaatttgtggtttataggtttttgtctgattgccttattaatgaatactctccacttggattttcacataatactgaatacccagtcagtgtttgtcaatattttcttgaatatcacacagtgatattccttgaatgctttaactcattgtctgacactcctaatagtcattgaatgtgagtccttatataagggttttcctaagagaagtagaatataaatgtaataaaacttggtaatgtctcccataccattgcattctactttcttccaatactacatctgctttggagagttataaatgataaagatgagactcagttatatctgctttgtttttccttgaaactagcagcaactatagaaaaaaatggaaatgcttctattcaattaaagacaaagtaacaaagaactctggtgatcttgataaaagaaaaatttatttttatctatgaaatcaaatgattctatactaatgaaatagctttgaggaaaaaccatgcagatttcttgcccaaggcacaaaactgaaagacgtgtcaaataattttagtcattaatataaataggattttaatgcaacattttggagactccatattaattccagaattcacacactgagcaagataatgattattcctttccttttccttttccttttcctttgcccagggcactattatgcctttgtatgaccttgattgctaatattaagaagaaaattatttaagaaaagatttttgtaagttgattaaggtgtgagtgagaatttgggacaaacaataatgtccagatttcaccaaccaatgagatgtgtagtgaaccatagtaacattgtccactgtgagaggaagacttagttccaactatagaataagatcatattgctagaaacctgtgttctttggttattgctaaatgtaattatatttctactagtaacaaactatatgaggttgtaaaaaatttaattcatatatttcaatacttggttacattttcaattattttgtgtagacctcatctggctctcaaattcattcttatgggcttttctttaattgtttttctataaatgttgttagctaagtgagcctttctgaacctcccctccatatcccataagttcctagatctacttcaaacctcatatccaggtcactcttctagcccagccttccatttttgtgccacccatcaccttttggcttcatccaggatgtcattgcctatccacaacaacaacaacaacctcctctcataccatatctagtgattctttccagctgtgtcactgactatttgtccaatggcccagcttggttgaatctgcctgttcttcttctacatataccctttccaaaccccatatataccttcaaactcaaagtttagaccaggattcacaagtttgccaaaagcttagccccatgagtccacctggctatcttcaatctaagccacatccaatattcagcccctatctgaccagaatacctgtcctctgtccaagccaactgtgtccagatcagacacagaacttaaataagaagttcacatgcataattctcatcacaaaaatataaacaatgtggaagatcaaaatcaaggcaagttttcatcaccacaaaaaaaaaaaaaaaatccccctgtatggtagaaatattcatcaattagacttacctaaatgaaccttagaacacatacaaaaaatacaaaaaacactaaaaaaacaaaattacaaaataaaataaaacatatacttggtctaataattcaaggttttgctaaactatgtgagcctatattagaacatattggtgtgtttactattgcagcactaataccatatgaagactgatagaaacagttgaatgaatataaatataatgaacttaaagagaataaaagtctaatgatgcccccctgaaatctttaaatatgagatggaagtgagaaacacaatccaggatttggaaaccatatttaataaacagagaaacattgaagataagacaggcttaaaaactaataatttaactaggaaaacaaacagaatgcctttcaagtagaattaatcacacagaagatagaatttcaggactcaaaaataaaacaagtaaatgcaccaaacaaccaaagtctataaaaaagtaaaaataaataaataaaataaaacagaaagaaatagaaagttattataaaagaatgtgggaaaccatgaaaatattcagtcttctaactatgaatgattatatcaacaacagccatctaatatttgaataagatgccaaaaatatactgttttaagtcatactcttcaacaaatggtgtgtcattagttgactatatacatgtttctatatctatatcaataactctatctctatatatccataacatatctatctataatctatctgtgtatctatgtatctaagaaatatatatatgtatatacatatattggatatggatatgaagatacatatagatagaaatatgtatatatacatatatgcatatatatcttcatatccatatgtatactcaacttcataattgatactctttaattaaattgtgttttttaatttgactgtgtcattctattctaaacacagctctggtctgtgtattgtgtgattaaggtttatttttcctatgctgctctaacaatgctaaatgttccaatctagtctcatatagttccacaaaaccaaatgtcaagctggagagatgtctcagaaattaacaggacttcttatgcagggattattaatgacatttctatcacaactacaaataaaacagtcaagtctgtgtgtgtcttcctgtaaccctggtattccatgatacaagagtgtcctaataactctctgtccagtaggtcttcctaaaatggttggtaagcatatgatacagtgacaggccttgtcttatggtaatcaggcagagagtgataaaaggaagaccattgactcttttctgtctttccaatgcttatcaaggggtataaacacccacatattaatgtatatgcaccacatacactcacatatacaggtgcacaactgcataaagatactaaaatatagtagtaatgaaatggccttgtaaaaactgtataaaggtggagagtaggaattgaaaaatcaaagtaagtacaatgtcaagacagcaataattggtggattggttgggggttattgtttattgtcctgacattgccaatttcctctaaatttcaaaactcctagcatatttatttcagggacacctagtgagtttattattaccatatgtattctaactttgtaaaatacagaggagtttttatctgttgattcacaaagctggttaaaacaaaattataacaaatctctttcacatgctaaagaaaagaaaaaactttatctttcaaaagtgatggattgcattctgtctcagagtttcctcaggtcatattgctattctcagccgggctacctaagtgtggatgcttcagtccttagaagggggaacaaaatacttacaggaggaaatatagagacaaagtgtggggcagagactgaaggaaaggccatgccgagactgacccacctggggatccttcccatatacagacaccaaacccagacactattgtggatgccaacaagagcttgctgacaggagcctgatacagctgtctcctgagaggctctgccagtgtctgacaaaaacagagacagattctcaaagccaatcgttggactgagcacaggatccccaatggaggagctagagaaaggactgaggagatgaaggggtttgcaactccataggaagaacaacaatctcaaaccactagaacccccagagttcccagggactaaacctccaaccaaagagtacacatggagcaaccatggccccagctgtatatgtagcagaggatggctttgtctggcatcaatgggagaagaagcccttggtcctgtgaaggcccgatgacccagtgtaggggaatgcgaggacagggaagcggtagtggatgagtgggtgagtgggaaagcatcttcacagaagcagggagaaaagttatgtgatagggggtttctagaggggaaaccgggaaagcggaataacatttgaatgtaaataaataaaatatccaattaaaataaataaataaaaaagaatgaattatcttttgcagttcctttaaggtgtaggtaccatttataaaaaggaatttgaaaagcaatttaagtgcaaaattcatttgcttccacctacatgatttttctcttacattttttgggttttccaagacacatcagtttgacaaaaaggggtttaatgactcactgttatcaagacttgtaacaagacttacaaaatcctacttggtgtttatggaaatggaattcttttacttttatacttattacattggcttatacaaatattaattaaaagtcaataggtttgagagagatataaccagccagccagaacttgatgtgcaccctatactatgtggagcagaggcatgggtactcactggaatatgcagtaaccatatattctcagcatgttaagtgcctagtgaatctaatggctctaggaaatagaggtcagtgaggaaaaatagttttagtgtgtcccgggtttctattaacatctaaaaacaattttaaaacttaaattattaaaatactttttatatctaccacattgatccataccagaatacaaaatgtccctctcttgcagtcaatttatgattcagaaattaaattttgctcaatacatacattatatcatttatatgaatgctaaagaagagaaaaatcaagagatgacttgccataaattcacagccatatgtaagagatagaatgacaggtggcccttgggataatggtttttaggagactctggaagttaacagtcacaaatgatggtttagggtattgcaggaggtatagagatgtcaagaggaaaggggagctcacttcttcacctgtcactgaagaattgtcaactaataagaaaagagcaccaaaaaggagtaaactcaaaagaagttcactgagactctgttacattcatatattaaacaggaaaatttcctgacagagttcagagaaaaagatagcatatctgaatttaaaaaaaaaaagttacttgtttattaccctatatgatggtttgtatatgtttgacctagggagtgacattattaggaggtatggtcttgttggagtaggtgtgtcactgtgggtgtgggctttaagaccctcatcctagctgcctggaatccagacttctcatagcagctttcagatgaagatgtagaactctcagctcttcctgaaccatgcctgcttggatgctgccatgctcccaccttgatgacaatgcacctaacctctgaacctgtaagctatcccaagttaaatgttctcctttagaagagttgccttagtcatgatgtatgttcacagcagtataagaccataagacaccttagaagaataacttaagtttcataaaggaaaaataatatgggttttatattttctaagtacttagtgggagaaatcagtcctatctgttagaaaaatctaaaaatgaccaagagccctaaataaaatgagtcagtattttagggatgattccaatgttaagccttaggcaagttgaatcattaagtttcatgcttcatgtttctgatgaaatactccagtaaaaatagtaccctgaaaatgctaacctgcaattacccaattagaactgcagtgttataaaatggttttgctaatgaatgttccagttctaaatgttgaattttaattcatcatgtcataactcccagtgccattcttttatgtgtgcttaacagttttattccctggctccattatttcatcaatataccttggtatcacctttctattcaggcactccaatgatcaggtcttgctcactgtgttctagaacaatgtttcattttcagagaaatctagtcaatgcataaaaaagcagtcaaagaaggtaacaacgtttttactgaaagataaaaaatgataacagatatcccacatcactaaaaatctctacgaggtcatgatatttggggcaatacaaattatttaagaattaaaaataattagtggcattctagagttacttttgcaaagttcataaacagtttaatcaaaattaaacagatgtaaacactttttagaaaataaaattctatacttttttgacattctgttcaatatatctttgataccctcttaactgtagtgctgtctttaactcatttcattactgttcagtggttctgatagaataagaacaataaatcagaagaaaaggaggaagaggaggaggaggctttgaaggaggaggtggaggaggaagaggaggagggggaggaggagggnnnnnnnnnnnnnnnnnnnnnnnnnnnnnnnnnnnnnnnnnnnnnnnnaagaagaagaagaagaagaagaagaagaagaagaagaagaagaagaagaagaagaagaagaagaagaagaagaagaacaacaacaacaacaacaacaacaacaacaacaacaacaacacgagcaagaacaagaacaggaacaagaacaggaacaagaagaacaagaacaagacgaacaagaacaagaagagtaagaacaaaaagaacaagaagtacaagaagaacaaaaagaataagaggaacaagagaagaacaagaagaaagagactgttggtttcattctcctttatttgagtatcttattattcaggttatatattcaaatagggattaaaaatatttgaattcatttgtagtgtggctaatactgattgccatgtaatacttattcctatttgtttcttatcaatataacaattttgtttaggtcaaaagtgatgattgtgagcaggttttcctttttttttttcttatccttctttttttaaaagacacttccttgctttgcctgtctaccatgcttacatgatagtttctgaccattttgatatgcaagtcccttgaaagcaacaacattgaggttataacaaaagctgtgtgaggagaatcatgctctttccctcttaactccgtaagtacttagaacttgaagactggagatctagcaccatgttattcaagatttgaggaggtgaggacgatgaaattcaacagagtaaaaatgaataggcagaagggcagatattccctccaagcctgaaggcagtactgaatcttgtgcatagttatccctgttgtcagacttgacccttaagaacaacatgaacatatttctggtaggcaatttccatttgttgcagctgaattcatttgcaactaaatcagaagcatgcatttctcacagagcagtaaacctgttttattccagatctatataattgaaatataaacaataattcatcaagaaagcaaatagcaaatggtgataaagatgttaaagaagaaatataccctcatgcattgttggagggaatgcaagttggttcaactgctatggggatctacacagagctttctccataactgaaaacttcactaatacgtgatgcgactattccactcatagttatacagctggacgattctgggagcagatcacagagatatgcgatgtcccaggtctactgctgcacatttgacaattgtcatcatgtgaggcaatcctacatatgaatcaagaaataaatgagtaaagaaattgtcacttagatatccagtgcaattttattaagatgttatgaagcctgaaatgtcatttgagagatcaatgcaactcaagagcattattttaactgaaatgagtcacatgcagagaataaaaattggcaaagttgcatatgttctttcatattttggatgtgtgtatatgtgtggtaaaagtagaaagtgaactttctggattgatgttgtttcatttagttgaggaatgtaaagataacaagagaggttaatggggtgaatatgaaaaacgacatgaagagtatgaactagggaagcagtgggggagtttgaggtagggtagctaggaggggttagagagggagacaggggtaaagatatgctattcctttttgaagataaattgctttaaaaatgctataatgaatacagttattttagtaaattatatacattccattaaaaaactaagctaatgaagagctatttatataagccttgattttctactcattcgccaatatctgacaagaaatatacttacaaatctttataccaactatcgattttaaagacctctatttctagctgtcctttaaaagattcatttgtggatttttttacattgatgacatcaaatatactcttactactcttattatcaagaaatatatactatagtcaaagagaatattttccattctttctgaagttgtgcagttagcattcacaataaatttaattaacatatttacacaaatattggaacaagagtaatgacataatttttcatttttatcattttttctaatttcaatctcttatataataatcattcaacagcaatttgattctcctttgttctaatcatatcatttaaataaacctttctctttcatgcttggcaaacatcaatatgctttaaagtcttctagaaaacagagttagaaggaagggatccaaaaaatttttgttagggcagccatcaccttgttagctaatcacctaagccagaaaaagacatcaaaagagaaggaagctaaatatatgataagtattgatgcaaaaattgtcaataaaaagttaccaaagtgatttcaaccacatatcaaaagaaatatttatcctaacaatgtgaaatttttcctggattgtgagtgtaattttctataagctagtgaatgtaatatatcacattaataaaataaattaaaacaacacattcttttcagctgatatggaaatggatcattatataaaactgctactactatattttgatagaaaagtatttttaaaaaaataattgattttgagtattccatatatggagtactctatttacaactttctacctctctctaccaactcttaggactgactacctgatttaaaaataaagaaaactttatgaatttaggaataggtaaagggccctcagtattgtaaaatctgtttatgaaaaaccaataattaatgtcatgatcaattaggaaaactgaactttttttttttttctaaaatgcagtagaggtagaggttagctatgcttgccacttcttttcagcatgtggaattttactaaactatggttgagtgacggaactcatcaattttttacctattgtactagaatgccaagcatcaaaatgtccctaatacatccttgtgattaagtaaattttctggaagttgacttttagattgagagtgtgtgtataatttgaggtagactttaaaatgtagaaactaagaataaaaggctaagggttttagtttctctaatctcttgaatgagtttccccaagagaaagttctcttgtttttatcttacttttttgataaaatattttaataaaatataaataaataagctaacaagtaagtaagtgatataatttgtcactggagttaacacatctatgtttgccaagttagatcacagaacaatttccaggactcagaaagaattacagctatatctgagggttttggaatgcccaatggttgcatggagcctgatttaagtttttgttatcccctatagaatatgggaaatttagatcatttataccttttcatgccctcttacctctattttgttttccataccaagttacaaaacacatggatccacaatcttttagtagcattagattttgaattaataattcatttgctttggaaaatccctaacaaaatactggataaggttttggaggtatagctatgccagctcagattcctttgagcatgtgtcacctctcatgtagcttctctgatgagggcttagagaaaagactgctcaagcctgacaggagatgtctgaacgaaacaagtcagccaagtccatcattataatcattttaattcagcagagaaaacaggtaaaatattacgtaagttggtgtaacgatggcacagtttggaagaggtgaagcagggtagggtatgataggatgtagtccatgaccgctcgtccctcacacaaagctcaagcttcagtcgtggtgatgggaatcccacagttaagactgtgctctaagcttccatggaaatttgttttattgtttgtagcccggggaatacgaacttgaaaattgctttgtatattcatctcaatttttgaaaatatacatgttacagaagtaaacattaagcagtaaccagctttctgaaagaaaaatatataaagtaaaacacctgtcaataactcagctataattatatcccagaatcgttatcagatcactcattgagtatgtattctacatcaacaaatacgaagaaacacttgtatgctgtttttcttttcacattaatacaatacattcagttgattggaaaactgaggcactaaaatcatataatatattttccattattattgatatttatacctatgtttgtactaataacaaacaataattttaaaatataaaattcctatatcttaatacttggttaaattttcaattattttatggagatgtataaaaatatcttacttgaaaatagatctttatctcatatactatatgcccaaaacagttttctcttccactactcttcccaactacccctcttcctctcccccagatccacccctctctcattccttgtcaaaagaaaaagatagtgttatttggttctctgtagtataacttcttgagctctttgtatatatttgaaattgtccctctatcggatttaggattggtaaagatatttttccaaactgtttgttgccttattgtcttattgacaatgtcctttgcttgaactcaagaagttagactccagagaagcaaataaccctatcaaaaaatgaggtacaatatgcaaaatacataaaactcaagaagaaggaaaaccaaagtgtggatacttcgttccttcttagaatggggaacaaaatacccatagaaggagttacagagacaaagttcatagcagaacctgaaggaacgaccatccagagactgccccacttggggatccaccccataaacaaccaccaaacccagatactaggcagatgccaacaagagcctgctgacaggagcctgatatagctgtctcctgcgaggctctaccagtgcctggaaaatacagaagtggatgctcacagtcatccattgaactgagcacaaggtccccaatgacggagccagagaaatacccagggagctgaatgggactgaagccccatagaaggaacatcaatatgaactaagcagtactctcagaattccctgggactaaccaccagccaaagaaaacacatggtggaactcatggccctagctatatatgtagcagaggatggcctagtcagtcatcagttggaggagaggcccttggtcctgtgaaggatctatgccccagtataggggaatgccaagaccagcaagcaggggtgggtgggttggggagcaggcgaaggggaaggggatgagaatattcagaggggaaactaggaaagaggctacatttgaaatgtaaataaagaaaatatctaataaaaaatgggctccagagctaaacaaattctcaactgaggaataccggatggttgaaaagcactttaaaaaaaaaaaaaaaagttgaacatccttagtcatcagggaaatgcaaatcaaagcaaccctgaaattccacctcacaccagtcagaatgactaagatgaaaaactcatgtgacaacagaggctgaccaggatgtggagaaagaggaacactactgcattgctggtgggaatggaaactgatacaactaccctggaaataagtttggtggttcctcagaaaattggagatagtactaccagagaatgcaacaataactctcctgggcatatatccagaagatgctccaacacataataaggacacatgctccactatgctcatagcagccttatttacaatagccagaagctggaaagaacccagatgtccctcaacagaggaatggatacagaaaatgtggtacatttacacaatggagtagtactcagctattaaaaacaatgaattcatgaaattcttaggcaaattgatggatctggaagatcattcttattgaggtaacccaataacataagaacacatatgatatgcactcactgataagtggatattagcccagaagctgagaatacccacgatgcaattcacaaaacacctgaaactcaagaaggaagaccaaagtgtggatacttcgattctccttagacaggagaacaaaatatacgtggaaggagttacagagatcaattgtgaagcagagactgaaggaatgaccatccagcgactggcctacctggggattcatcccataaacaatcaccaaacccagacactattgtggatgccaataagtgcttgctgacaggatccttataaagctatctcctgagaggctctgccagtgtctaacaaatatagaagtggatgctcacagccatccattggactgagcacagggtccctaatgaaggagctagagaaagtacccaaggacctgagagctgaattgtttctcaacctcataggaggaacaacaatatgaactaaccagtactttcagagctccctgggactaaccaccagccaaagaaaatacatggtgaaactcatgcctttagctgcatatgtagcagaggatggcctagtcggtcatcaatggagggagaggccctgggtcttgtgaagaatctatgccccactataggggaatgccaagaccaggaagcaggaatgggtgggttggtgtgcagggggaaggaggggacatgggtttttcagaggggaaaccagtaaaggggataacatttgaaatgtaaataaagaaaatatctaaagtaacaaaacaaacaaacaaacaaacaaacaaacaaacaaaccaggcctctaagagatgataggcaaagaggacaaatcaagatataataaaataaattaaaaatcttccttggctgttgtttagttttcttgatgaataacagagtgacattacaggcagctcaacactaaacactggtgactcatgcctacaaccatgtttgtgttatgaaaaatcaggtggtatatgaagtatgtatttttttagtcactaatattatggagaatacttagtgtcgtaacaatcatagccgaattcagacctcagcttatttaggttatcctctaagtcattactacatttatgatttaaaaatgtttaacttcatggcctgtgcattatgactcaagtatccttattcttgttaaccattttcttgagatacttatgaaattacagaatcataaaaagccatggatctatctgcattccaagaacaattttattgaaaagtaaatacaatttacacacactctagccataagaaagagagttacatgatttagctattttgcccgctgaagatttatgtgcaatttaccttctttcaaaaaagttgttatgatataagtaatgtggattttcattttagggtaaacatttctccacatcagttatttactcatattcctgaataagctttgctcttctaaggttagttcattttgtaaagagatgttcataactgaggggttaaaagtctctaatgtaaaagcactccacaatgagcaagccagaacccttgttctcaagtcatctggtgtgtgaatgccctttctctccctttctcacattctgttacctggattcttgaaatagagtccctggtcttttacctagagtgagatttttggtttttgaagtataatcaggacaaaagcctgataaatattggtgtgggtgttacaatttccttttagaaataaatggatttattgctgaacaagcttctggagctaagaaccacactaggctgcctatataggacagcctggattttaatttttaaattggctgtgattatttttagtgttggagtatctgtttctttcctattttttgaagaaatcaagaaacaatactgaagctagtaacatctattgattcttttgtcaggctaaaatgaagtgtttataaaatgtctacctttgtatctatatatgtttttattatttatatagcattaattaagcttaaaaattacaaaataatgagtgctctttgcaaaaatgtctgtggtattaattttggggtggctaattgtgtaagatctctacttactttttcttatcagaattttgcaagtcaatactagctgttttatctactttttaaaacttcatctaaataaaattttataagagcagtgatatatcactgatcggatttttatttcctcacataccacagaggcttttttccattaaaataacaaacatatagaactaaataaaaacattgaaattgctattataaacataagtggtagagtagtcgcctactatgtgcaaggctctaggattgatatccagccccacgaaaacaaaacacaattgagaaacaatcaaaatatagatgagaataataaaaacatatgcactggttatagttttatcatatttattttataacaataactaaatcttgttatatgttatatttgctatgaaatttatttattcaatttctaaatgtcttaaatatttctttatgaatttgtatgtgctgtttgcttgctttaaatatatcccagaatttatttgccacatcctctattggtgaatattcatgttgtttttcttatttcaataatgcttgcacataaagtttcattcatcgtttactgattataatgctctctgagagccctttatacttgatgatttaaaatttgtaaacatttgactaagtttgttttgttttgttttgttttttaactcacagcaatgttttaaaatgattctactacaaaatacttgacaaaagtgtgtgttcctgaagagataatttttaacttccttgaagcccaaaagagcagttgagatggtaaccatggataaataagaatgtattcctgtaccatcttcaggttctttggttacaaattgtgcactgtcatcattctagttaacttatttgtgaaaaccttttgattcatctcttatgaacatgtaatctgttaaaatacatattttaagtaggtatataaaacagcattattctgcatttcttgcattttcttttgttattagtttatttaatctcaaggcagaatggtgtatctattaataacaacctccaaatctcaaactcttaagacacaggttttggcgttcatttatgcttttgttcttcattggtttcctatagctgctgtctccattgactctgtgatttgttctacagaagcagcctttacatttaaaaatatgatttggtaacagagagaaagaagacccagtgcgaccatatctgaccttccacattgactgatcacagagttcttcctctgatcccattagtaaatttaaattgattcctctcctggtaagctatgtggtcaaccctgttagccacacagcaggaaattcaagtctatccctaagagcaacaacaaaaactttaggcctggattaaatctattttattctgctgctaagaggcttctccgagttggtagcatcttcattgagatctgtattagtcagggtttctattcctgcacaaaatatcatgaccaagaagcatgttggggaggaaagggtttattcagcttacacttccacagtgttgttcattacacaggacaggaaatgatgccaagtccatggagctgtgctgctaactggattgcttcccctggcttgctcagcttgctttcatacagaacctatgactatcagcccagatatgacaccacccacagtgggccctcccacccgtgatcactaattgagaaaatgccttacagctggatctggatctaaggaggcatttcctcatggaggcttctttctctgtgataactcagcttgggtcaagttgacacacaaaacctgccagtgcaggatcctatgttatattgcaatgttagtgcatgtctacctacactcccatgacattcctgtagagacaatgatccaaatgagcagatctctggaagaaaatctttacaaattcactattaagagctcatcaagccttgccttgcccacacgatcttactaattagaatccttctcctttattgctttttcatggctgttacacaaatcattacaaggcaagggtggtttgagagacaattttgtcagtctaagggctgaaatatcaatttctaaccatgtttagaaatatatttcagtttagaaaagaatagcgagaaatgtttctgttctctgtaatttgacataatttttatgtgttgactaaatataattttttctacaaaacatatccttataaatgtattttttaatttttatttttaatatgccattttcattatatttatgtggttttgtctgtatatgcgaatgtgtacttcagagagtataaaagagcagaagtacccatatcaatatcaggacttgattctctcttcccacaatgttgtttccagcatctggacaaggttgtgatttttggcaagaggttccattacccgtggagtgatcttgacgttattatttattttcttcttatcaacagcaactcagtgcaaaatatttctcaatctgagggtgaatctaattggaagagcagccgaataacatttgaattgagtctgaagctcaacacttcaaaaacaaacaacaataaatgactaaaactgttttccttttgaggatgcaagaaccacggatgtcgtaatttaaatttctcttgtaatggagagaagctatatagcttccagaggagagaaacatgcagagtttgctgtatctcaagaggaaaacttgcaagtggcatgtcatagaaatctgaggtcatctgtacctatgtgtgattgctaagttgtaagctcaatttattacattgtgcatcccaaaaacatagtttttcacttacattctctgtgctcagtcatatttcatattccatttcattttcttaggtggtgcattaaatctcttgacccgtgcatatgttgaatggtggaacacactagcgtttatgtttcattcttttcttttgcacatgttcacggtttgaaaaaagcaaaattatttgaaatttagttctacttctatcaatgttgctgtgagaatttactctatttcctatattaaagcattaaaatgttaattttctagaaatttctattctacttgtcatttaaaatggcaggatgatttgttacaggatagaactggtccatattttgcttagacatcaaggaatactgagtccataagctttagtgtaggctctcctggcatttaattcatagatcaaagattctttcctttttaaagttttatttgcaggacttttcacacaataagtgacttgcgtctgaggaacaggaaaaataaagggtgggcatatctcaagtaaagtagattcattcagagattacatataataaatttcaatgaaggtagacattttaaatgtcccattagtcccatggagcagactactatagacaatcaaattacatcaagtttctgtttttacagctttggaatgtatcttgaatgttttacaactctctagccctgaaagaccactgaagctgtcacacacatatgtttgtccacatgtaaaaataaatgcaatggccgagcggtggtggcacactcctttaatctcagcactcgggaggcagaggcaggcggatttctgagttcaaggccagcctggtctacagagtgagttccaggacatccagggctatacagagaaaccctgtcttgaaaaacaaacaaacaaacaaacaaacaaaaactaaaaaacaacaacaaaaataaatgcaatgatcttaagtgttcttcagtaaaaactagtgaacatttcatatacctaggtttagtgcactagtagaacatacttttgtatgttgtctagtcacaagtatctttctgaatatttctcaatctatttcttattcctctttaccttgaagtttcttcatattgcataaacattctggccaattttttctctacatctgtttctgaaatatatctatccatctctctatctctctatctctccatatatctctctatatctatttctctatctatctatctatctatctatctatctatctatctatctatctatctatctatctatctacacgcacacaggtccaggctagtgagatggttcatcaggtaagggtatttgctgtgtaaaccaaggaccatgacttctgttcctgaagaacaagaacggaacaatgtcaaccgtacagacttcttctctgacttcctctgacactgatccacacacatgccacacttcacacacacacacacacacacacacacacacacatacacacaaagggagtacatgcctatgtggatctgcatgtgaatagtcatgcatgtgcctgtggaggacaaaggtcaacctcagatgttgttcctcaagtgaagtttatcttgtcttctaaaacagtgatttttagtggtctatagctcacccactaatctgtcctgcaccaaggaccaagactgttcctcctcctcccagctccagggttcatgagtgcatgaaactgctcatagccttcttaaacaggatctgagaatacagctctagtcctcatcattgtttggcagactccagcaatggtctcttcctgatcatttctatatcttaaattcattttattttatttttactcattcacattatgtccagttcactgtctcacatccagtcacaagtcactccccctcccacaatccttccctcattccccttccccctttcctctcattgggtggagaccccctctgggtatccccccaccctcacacttcatgtctctgcaaggctaagcaacagcttttgggatagcctccctcctccccgcctctgcctgcacccctcctccagttccatttgttccagactctcatgaagaccaagctgtgcatctctgctcattctattctttgaaagaaaagtgtcttcagtactttgttgaggtttctgaagcatgttctatggtctcttctttatttaggcactggattttgaattaatctatagagtatgtatggcaggtgcatacaacatggctccacttatgcgaattagtctgctctgtgcaaaagtaactactgtacattttttaattcatcctcatgaaacttgatgaaatactcaaaatagctttgctcatgagatttgcttatgagatttaaatctatgaatatatgaatataaaattgcttgctcatagtttattgttttatttttcaacatgtctaatattgaatggccaattttactcactcctgtgtttttgactgactacatttcaacctattgtccataatttcctcctgaacccactgaattttgtcttgctatcaggcagccggcctgctacacacaaggcactttcactagatgcctcaaacagcagacatgtttccccaagttctagaaggtgaagtttcaatatcaaaattctgtcagcattgatttctggacatggttctgttccaaacatcttgatagccatttttggctgtgagatgtgtgcacatgtgactgtttctgagtttttattttaactctatagttacagagacatcagctgtattagactaagacaccactcaattacctccctcacttacttccctaatgcctctattgccaaacacagtcacatttgatcatgtatgtcagcatggggaattgactatatataattcatgtaacagaaacagtcttcgcatgtaacaatagaaggttcagcattgatgagagatggtattaattaatcttgcttattttaaaagtagaaaatagcagtcaataatttaagaatttgtatttttacttgtagcaattatatgattaatgatgtgtcagaatattcagcgaagtgacctgatatcagtttacaaaatccagacttgctgtgtaaatctagcaactttagttcaatgcctggaacccaaattaaaaaagatctaggtatggtggatacacatctataattctttcctttcacaacacaaaaataagaagacaggagaataacccagcaccttgctttccagccagactgtagtatttagtaccacaaaaacaagagtccttgcttcaatgaggaaccaaaagaaaacagactcctaaaatgtgtcctttgagtttcatgcacatgccttggaatgtctatccatcatccccacaaataatatacccccattaaaatatacatgtgtattcaattcaactcaaaatagcagacaagtgtttaaaagaaatgaaggaataaaaccatgatataatcagctaccttacaaatgattagagtagaactaaaaatctatttgcatactttatctatcagtacttgctgtcaaaaatagtcttcagatagttggtgaaatctaaaattctacttacatattaatgatgctagatgaaattgttttctgaaaagaaaactcctaaagatatctgtgtggtttttctaccattatggtgcagagtggggcttttcctctcctttttttcctgtcctggtttctggttggatttaatgattctgtcatttctagaatatgatacactggatgaccacgtgattttcctcattgtcctctatatgtgataagcaaatgatgatcaaattatataatgagatttcacaagatccataggcttcagtacagttatcagagctgatgatgcttatattaatgaaaactcttagaaggttttattctctgccattaatttaattctcattttgtagttgctattgtttatggaaccacagaaaattccttacaacatcaatcaaggatatccccaggctgtcaaaccttcattcatccttagcttcatttcatttccacttgtagacattggatagggtgtgcagccagcctgttaatttctaatttttcagtgttagggatctggatctgttcctaatttctaagacatgtgattattgtaggtcttttacactcttttctaatagtggagaagaataaatgaaaataaaaaaacaaaaactacaacaaaatgaaattaaagtatgtttgctgaaatgagagtcaatgggatttaaaatgaaattatgacatccctttaattacatgatttattttctaaactcacactgtatggtacataatatcatccagttgttccatcaatatctcctttttggttttgcagaccttatgtgttattgtatgaactcacattttttagtactaaaataggacatttcaattctggtaacaattatgatcgggctgggtgtggagaagtagttgaaaaaaatcagcatttgagaagcagaaagaagtggagcagaagttcaaggcaattcttgactatataataaggttgaggtcattctggggtccctgatgtcctcaatcaaaaactatacagaacataaacaaaatggtgatcacactccattgcaaagtgggctattgattcttctttgtttcaagaatataatttttctaaaagtaggaaactcattctaagaacaggaaaaagcaggtaagagaaggaatgtatgaccgtagtcacatttggacaattcatttgttcctgagcctgcaccttttgctcttaaaatgaggctgaccatgagattaaggcacagcagaggatcatttgaatgctagattcatttaagtgtaacaactaataaatatgtatgagaaggtttcaataaaattggacaaacataatatacaaatcctgtgtacatctctacagtttcctgctatgaacacattagtccataaatctggattatgctattatttatcttatcagaaatgtgttacaaacaggatcccttaaatatgctctgtacagaactgttatagtgatgtgaggaatagtcttcttgctttcttatggctctttgtcttcttttaagggcagacagttagaaataaactactatagatctcctccttagatgctataaatccacaccttcatttaattctgattcatagactaagaaaaacacatttattcattcaggaaattaatcagtggaagatgactgagtgggtagaaaaatgaattatagggtagttgaatgtggcccacttgctagattatgggttggataattagttgcatcaaacaacctcattgtttccccctgagttcccttggatttcttcagcgtaagctttatcagtatttgtgttaaaggatgtcaccataccaaacatacaaaacccaatagcttattggaattcaaatcacctgcctcccagggactcactgtaacagtcatccatgtccaactgtccattactttgcctttcaatgctattctctagtagagtagaatgtagagactgaactgtgtgagttcattaaaaagagagagagagagagagagacagctccaaagtccttgatgattataataaattatgaacagagtttggttttcaatttacacatgctcacattcctgtccttgagaatctagtcacacatcaagaattgaactgaaattcccctattttgttgagtgaataattataacaatgaggaaacttttaacacagactgaaaatgttcctgtttgtggagattgcagaagaaggcagcagaggctatgctataacagaggctggggaatgaatctttcaatgtggctaatgaagtgtgtcgttgtgaaagtgggtgatgattagcaatgtgtgtaacaggaagctgttcaatgagtttgtcttctcacaagtcccagtgaccacagcacaggggaaaactgaagaaaggtgtcactcacatgctttgttaggacacacgattattacaaggagctgacaactgtttgggagtgcagcatgtaggaaccctttggagggcagaatgtccatgacttctctacaaagccatgaagaactacaagggaccttcactgaactgtatccaaagcaactttcttttactatgtacgatgatttttatcattgttctgataatttgtacacatatcttaaatatggaaaaaaacagagaagaaaaagccttcccattaacgacagtcatttttaatgttttggcaaactctctgccagcttttatgtgtgattttattattaacagttgtaaacatccaatatgtacactattaacagtgttctcacttacatttgagcaatttttaacactagcacaactgcaaaaattactgccaactttcttggtggttacaatgttgcctttaatgtcctgagcccgctataaaggatgatacgatattgcagcaaacagaagggtagatggtatacctaactattttacaacagaaaaattaaaatacagagaaatacagagatgtggaattatttttctgacaatacacgatagtaaatgctagacacaacatttgtagccaacctatttctagactgtgtgcttgcataacttgtcattagactaaagtaataaaatattttatagaagacttgatagtaggtatgtggggatgaggtgtgttagaatgtgtatgtgtcttatttgttatatcatcagtattctcaattctacgagttagctcattggttaacagaagttgtaggtaaaatagtgagcatttgtgttccaatcaaactttattcctgaaaattaaaatttgtattcaatataaatttatatgccatgaaatggtattgttttcatgctatgtaacctatttagaaatggaaaggaaatagctgtaaaggaggttgaactaaactatggaattccattattaaactcatgaatgcattatttataacccagaacattccccaatggtgaattactgtctcatgtacatgatgaaaaatgatacaataatcaggatttgtaaactgaatttctattatttttttcaaaactatttcttgttatatcttgagtttgatctaaccagagggaatgaatacttttcttatgcttacattttcctggaaaacaactatatgctagaaaaacataatatatattttcaagtttgaagtgatcaaataccgaaaatcatgtaaatgaaataatagaaaagtaaaccatggtaattctttaaaatataaaagggtcatggttaagttgacctaagctatcctgtctagtctgtgctgattttaatataatatgtaagaaaaattaaggaaattttctacagtatctacttgtcttctcagagtgtcctgtctgcctatgttcaaaacaatgaagagtgaaaggaattcagtaaatttcatggtgttttcaaatctgggtaaatgtcaagtgttttttatttttgttgtttttgtggttctagtttgagatatccaacaagccagttgtatggatagatatttatttccttaagtgttagtgatgttaacgattctctttctgtttaatgatgcatatgtatgcttgagtggcttgtataagtgtgtcagggagaaggctagaaagggccagatgccctggaggtatagttagaggctgttgtgtggaacctggtactggtggtggggcctgaacccgagtcattctctttctaaccctggatgtttctctggaaacccaggtaaaatgaagatgcagttgaacccctccagcttggagagtaatgggccaagctgcctgcttgttaggctcctctgggaccgaggttcagactttgaggtctgtagcaccattgctttccagattattttttaaatttaattttatttttacactccatactccattccctgcccctccacgtccaccctctgactgatccatatctcacacctcctccccatcccacccaccctgtctccacatggatgccctcaccccccaccccacctgacctgtaaactccctggggcctccagtctttgagggttagctgcatcatctctgaatgaacacagatccagaagtcctctactgtatgtgtgttgtggggcttcctatcagctggtgtatgctgtctgtttggtggtttagtgttttaaagatatcaggggtccagattaattaagactgctggtcttcctaaggaatcgcccttctcctcagcttcttcagccttccctaattcaccaacacgattcagctgcttttgtccattggttgggtggaaataactgcatctgactctttcatctgcttgttgggtctttcagagggcagtcatgattgatccctttttgtgagtgctccatagcttcagtaatagtgttaggccttggggcttccccttgagctggatcccactttgggcctgtttctggaccatcttttcctcaggttcctctccatttccatccctgtaattctttcacttgatgtcccgcttcctactggaggtgggctctatacgttccctctccctactgttgggcatttcatcagaggtccctccctgtgagtcctgggagtctctcatctcccaggtctctggtgcattctgggtgggtccccctgcctcaacctcctatttcccgaggttgcctgtttccattatttctgctggccctcagggcttcagtcatttttccttacctaataccagatcaggttcccctctaccacctactcctcccatcctccccaccccatccactttccctcccaagtcccaccattcctccccacttgtgattgctttcttctctctcccatgtgggactgaggcaccctcacttgggcactgtttcccagattcttaatatatatgtgctctgaatgaattctcttagattcttaagtacagctactaaaatatagagatgttaatgtcacataacctgtgcaaactggattgtaacactatggccttcagctcaaagatatactatgccatagtaaatgctgcctttgcctctactcaggtttctgagtaatcagactcattggctaggttgatccagactctgcctgtttgctttcaaaactaggattaaagaaacattaacaatgagaaaagagaattgcaatcataacttaattgaaggaggtgtagtaagctaaaaagggatttttttactactcctgatttctcagcaataaattgaattaatgaaatctggatgaatggcctttttctaaacataggtctgcaaatggaaaactcaattcagttgaccatcaaaaaataaatggatttctgtgtgtcaaagtatatttaaaacctctctccagtgggtagactccctattttgtagaacttgtttggcagccatttcaacctgtgtctttgccggatgcttccttctcctgggtgcatatataacttgaaccccatacattcttgtatgaagtcccctatctttctatccacacacccaccaggctttagaaagttttctgagatgaaattagctcatgaattccttctttgtcctataatgtataaggcggtatctgctctttttagtagctgaaccatactgattgaataatatccttgtatgttcagccctgagtatgacaaaattgacctaaagatttttggattgatttaatttgacttttcaagtaattgcctccagatcttcccagtttcagctgcttttccattggtgtgataaaataacacagcagactcagcttaagaaagaggcagtttactttggcttatggctctagaggcttagaatccatgaagctggagaagccacagcagcactcagaaaggcatggtggcaggagcaggaggcaggctgtccacactgaatccacactctacaagctgagcgagaaaagaaagtacgggcatgtatgaaatcatacactataacctgaatgatgcacttcctccaatgagtctctatttcctaaaggctctaaatccttcctaaacactaccaccagctgggcatcaggaggtgaaatgtgagtcaatggggaacattatcaaagttgtatttacagtgaattaactcagaaactttaaatactagacatatatattggaaacttcaggttgcctgctcagttgactctgcctgtgcagggatttgaggtccaccagcttaagtgttagtcagaaaacctgctcacggattcagctgtgaaattgttctctgacataatcataccattcttttttttttttcattaagtaacaagccaagtgtatcgttttgaaactcatctctagccctatttgatgttctgcccatttctaacggaagactgagcaccgtgcagtctatttccagagctgccatgaatatttatacgttgcctgcatctttacaaattagagagcagtaagatgaatgagcgtagtgaatcagagaagacacacagtgtgatgcgggtagaaatttactatctcatttctatttaaaacctgatgactcagagaaggaggcagtccacatccatttcagtaaatcccttaatgcttcctagcatgccattttggattttagcactactgggggttacttaatttattctcaggatgagtatttgtctgcatatgtgtctgtctgtatgtaaatgtgtatgagaaaatatgtatttaattgagattattttggagtgaaatggaaagaaataaatttaccaggctaattgttcattattttctgcaagtctcattttgtatgttgtctcggtgatgggattgtacctacgacctccaataaataattcttaagtctgacaaaaatgctatttgtttctaaattgatttttaatgtcttcagtttgcattttctccacttagttagctttccaataattatgcattagatttccctgcctttctatctttcccatgctcaagatcaaaatcttttttataggagacaagtgtcaagatttattattgcaatatcacaacttgacacctctgtactgcaagggcatggtgaggacaacactatgcataattttatcttagtctttgattatctggcaaaaatggaacaatttaaaaactgcattgtataacacagagtaagaaacaaaaatctcataattttcttcaaggcagctatctaacgcacattggtgagtgtaaaatgttcagagtggttgagcatggcctgaaatagaaaatcacatctgatactattaatttaggagttttgcttagagacataggcacaaatgatgaacacagagtcacaaattagccttgtgctgactaagtcattatttacacagcaatgatagagaaatattgtacttctttcatggttgttgactgtttaatcagttctatatatgtgctccctctatgctgcaacagctacaggctcctctgatagatgcccatatcaaacaccattacctcacatgtatgatgaaagtagaatgccatatgagaattttgaacacttacattccttcaacacttgtcatttcatttctcatgtttccttccgggaaagagtgagtccatactcaacatgaaagtcttgattttctggagcttactgtctatttcgtaataaggaaatagaaatacaatgtaaaatattgcttaaaagccatgctaagtgctgttttacctacgtgtcagcaattataacaacagaaacacagaaaggagcctgaaccttagagatctaggggtgatggtaccaattttgtaagggctgtgtgtttaagtttaaatttaaaaaaatgaaagtctatttggataagagtggaaaaaagggtggaaagtgaaattattgtggatgacattttgcacatcaaggagctcttttcctatggggatattgcattcattttatgttggtaattaaagatatttattccagttttgatgtccaagcagccatctggacatcaaagcactgagccaagttgccctatggctggaaggaaaatgacacaggtccagttctgtggaagcagaagctgaagttaaaattatagttcaaggaatttattaaggaaatagtctcaggacccatgtcagctgctcgtagaggaaataagattacacacagtggacctgacacttagcagagcattctgcatgggtgttagaaggagagtagagactctggggagtatctggagatcatgaggtgctcggtgtttacccatctgtaagcatctctataggtcaaagcctgtagttatggaaagactcactctccatgctaatcttgctgatttgcttttggaaccatggtgaatttgaggattaataaggtctgtctcttagtcttcactgtaatgtctgctagagttaactttgttcaccatctgtattgtgtaagggatgttgtctttcttcatctatttggacataatatttgcctttgtaccattatttcccattcttttagctccccactttgaaaatagcatttattataagttgcaatgactcctgctgataaatctacatacacatcttcataaaacttattatatccattcctaataagggacaatcacacttaatagcttagtgtaaagatatatagatttccccctatttatttatttatagacaaacatgcttttctgctaatattttataatagtttattttcacactatggcaaacatcttcatgaagcaattgcttgaaatattatccattctgattttacaacagtgattattatcagcgtgcaatgacaaatctgacagcgtaatttccatcttttattggaacaaatagcatggcctcagcatcattgggctgtccttacacaagattttatggatcattttgggatacatttttaatggtggaattctagggtcatcctgtctaccacaatggtgtttccactccaggtccccatcactagaccctggagatgactctgctggccttaatgtatgagttcagttcctttaaacatggacgttttaaatgatcgttatctcatgacactccatcattgaaaaacaccccttagatttcagcatgtcttccaatgtctttcaggtgctaagcttggctgctgctgcagtacccaacttctggtctcctcacttgttcctatcttgtctttagccacttcaccttttccttgcagggcaagtatgtcactatgtcaaaatgtattcttcccatgactgcatctatctttcttctgggtactctagccctgcactgctgatttcacgtttctccttaaatgtattttgctatttttatcatacatttgtttactgtacttttccttccaaaatgtttgatttatatgtataagctaaaatacgttttgcgtatttagtatacatactttgattaacatcatgtgttcccatgtctgtggtttcatctccacaaagtatatacacatctatcagctctgaaattatccttgcctcctgttgtattcaatatgcataatactggtttttgtgtatatatgcatgatgtgtaagtgtgcatgccataacatgcctgtagaggtaagaggacagcttttggaaattcattttcttcttccacccttacatgggttctgggagtcaaattgaggtcatgacgatcatgcagcaagtgtttaatccgtgaggccatctcactggctcttattcagcattcttttacagtaagaatacttaacatgaaaaaaaaatcctttgaatgtactttaaagtagatacttcatgctattatcctaaggattgctatgtagtagatatctagagcttattaatcctgtataaccaaaactttttatgcactatacaatattcctatttttatccatttcacacataaatggaatatattttgagccttttattctttgactcttgtagatgttttatacaactggaatcatgcattattgatcatttgtatgtggtattttttaccagcacagtggtttccacagtcatatatattgttactaattgttatttgtttcttttctttgaggctggatgagatcacattttatgtgaagaacacatttccctttattacttatctgggtcatttctatagttgaccactgtgcgtagcattttaggggacaggggagaccaggccatttgaaggttatattctcagaattgttattgatgaatcatatactgtttacatatttaatgtcaaaagccatatataacatatatgtgaatgtatataacatatacacaacagcagcttcaccattctgtttattcctccagtgacagaggaggttccagattctctacatttgtgccagcatttgccactttcctatttattagtattatcagctaccatacaccatacagaaatcagctttgttgttagaaatgtgtgtacttattatatattcatgtcatgaaaatatgagttctagcattagataatacatagaaggttatttgtaaatatttgttgaatacgtgtgtgcattacatacatgtgagtgtatgtatgtgtgtttgaatatgcatatgtgcatgtgtgtgtatgtgtgtgtgtgtgcttgtttgtatgtgtatatctgtgtgtttagatagaatggtttaaaaggcttccaaactccaagatacccttgggaagtgagcacttcacttctccttctggctttttggtgatgactcaggtaacatatatccctaaagctgtgaattatactgtaacagtaaaaactttcagctgggatggcaggagagtcaagtaaggatatttttattgaaataatagaacattggaaataatccatttttcttaaaataatgaatcatttgaattttaacctttaattatacaccattctatacatcccgtaacatgttcatatctctttgtatatctgtttatgtctctcactctgtttctctctatctctttgcctctgtttatctctgttctctctctctgtctctgtctctgtctctctgtctgtctctctctctctctatctgtgtgtgtgtgtgtgtgtgtgtagataacatcattttaaaaggctttacaagtgacttgcaatccagtattctagaagataatagctttctaactacaggttccaggggtaatgaaatgtcttattccatttctcacacatgtgtttttcttcattgttcaaaatttttattactgaggtacctgaaaaattccctgcaagcttcaaggagatcagaattctgcttaggaaatgctaactgtagccctggttgattttgcacagcagccagaggaggtctacatcacttcttagccacccacaatactaattaaatttacccatgtgaaaagggaacacccaccctggttattttgagccagtttgttgaaacactggttgaatccttctgtatctttgtatttccccatctcaaaactataggaacccacagaacttaccacaggagcaaagagaaccaattttccttttggaaacacgacaggatttataaagacagggagaaagttttaatccccagccagccttctatgagagtcctgatgttacctgctagcattttttcctttatggttttcctctgtagagtgaaagaacttgttccctggagtcaagtagatctagattaagataaagccctgcatttcccctggtatgattctaaaaccatcatttaagctacctgcatctgatacaagagaaacgataaagtccacctggttcagagcaaacattaaatattataatgaataaagaacatgagtggaaatttaacatttataatttgttttttctctctgtattctgctccatgattggtagtattattctttaattaataaattacagtgttattgaggatctactgtgctatagagaaaaaaatattgtaaggaagtcatcccctgatttcagggcacttatgtcctacttggggaagaataaaaaataaacaaatattaaataagttgaatttagatcatgatacattcttaaaggatgtaataaagatctggactgaatgttgacgaggattgggttttagtctagagattatgatcaagtgcagcttcatactatatgggacatttgaaataatgctgtgtaagtgccattttgtgaaaatcaagagttaactctaggggggtggaggaaagtaggggggggaagtgaaaagaccatggctgttttctgtttgtgaaactgagagaaggaagaggcaaagactatgagtgggggaagtgggggttgaagaatgatgtttgagtgggtagacttggagttatgacagagtttattcttcttggtttggtctataatggaaagccttctgggtggttttaacaggagggtgatatgaaggtcagtgtgtgtgtgtgtgtgtgtgtgtgtgtgtgtgtgtgtttacttttgtttaatagtttaggtgaagaacttgttaaatgtataaaagaaccaaaattcagaactgatatgttcttcatggttagtgtacaatgcaactgtagtgggaagaatagtctcccctaaaatgaaatgtcctccttctaattctgtgtggctgtgaagataatcttatttagaaattcagtcttctaaatagaattcagtagaggtagcagaataaaataatacttgtcttgagataagttttaaatctaattgataaaagaccagcaaggaagatagcagagatgggtcaggatggtgattctgttaacaaggggcacctgaaggttctagaaatcaacaaaatctaatagacaggagcatggatatgtcttcagaagaaaacacgctgtcaatgtattgcattcctggctttaagaatgatgagaggatatatacatgacactttgaactgttgaaaagctgtcataacaagacctaaggaattaatctggcaaccaagaagatagttacaaagggaaaggtggaatatatctttgacagctgtgaagaggtggatgaatcatcgaagtaaccctgcctgtaaggcacactgaagagtcattttctttggcaagaattttgatttctcattgtatatctgaaaatgactatacaggttgggaagatcccttgaggcacagaccccaagtacaaattttcagcaggtccatgtttcctactctgctccattaacaagggccaaacacagaggccatctttctcactcttgtgacctactttatttctcaagctcccttataatttgcttacattatattaacagcaggagttggtaatgaaaattctgaagtagggcaccttctttaatataacaaataattttcattacctgcaaaattgccacagacaagaagtaattagtagtgtagtatgtaaagaaaaaagttctgtgcttatagagaaagaagaaaattttgggatgggacaattgtttgcctttgtcatttgccaggtggtgatacattagcctgtactgaatttctaatatatatgacttcctacgtgataccttctatatctgtcgcttctaattattgtgattcttagaggacagatattaataaatctgttttaaagaagacactgtagaggctcagagagttccagtcaaccactcaccaaatgtttaatattatataaagatagggttacatattcatccatctagttatttttgtcttaaccaaactttacttttcccttgaagttatcatagccactaaactgatcttgtcactgactttattgatagattcagcatttatgttttatatttggattgtaaagccaacacttgtttctagagactcatgtaagaggcatacaggagcctctaaatatttaggctgtattatgcaacagaatggcagagtaaagggggagaaaagcattgctttccttctttcttgcttgctttttctcaggagaattagcacaggtctgttgctccttcctttggcaagaagcagtagggcttgataattgagtgtgtcatcttctaactttgtgttctttcctttgaagccacactatattatcctgggctgaccagtgctgacattcagacctgagaacagtcattaaactgtgattgcattgctgttttactgtcccttgagttcttatgaattggtttcttctcattatggggatttctcctgaacctccagacattgccattcctactgccttcttgagtccatggcttgaattcataggctgggaatgtcaagaaggaagagacagtggtggtgtgtctagtgataaagaagcctaggtaaagaatgcattagttctcaggactaaatcttttctttcaagctatctcaggttttaagttctatgagttgccctgccatagaagtgtaccctactaatctcgcttctcctcatggttcctttggattaatagagagtagatgtgtaattctctaattcatcatgatttactttgtcaagatcacaataaatagagaaaggagatctatttgtgttgtaaaactaagaatactttcacagctttgagtattttgtcttcttactctatgattttcatatatatctgtaatgattttgagacaatcatcaaaagggcttcatattattttggtaagatataaatgataataccaggtattgagttattttagattcctagaatctatatgaatatgatttttgattataacatatattatgagttggtaattatcatcaacatataatgtattaacatgcattgcatgctatatttgtaaaataaatcggttcattacagttgacaataaggggaaacataccatgtgggataaataccaagtttttgaatgtacagaaatgtagtaaataacacataaattaatttgaacattttaaaagagataaatataacagaaaagtgacattcatgataacacaaccatagagttgcctatataataccagaacaatggcaacaccaatggatctactaacacagatgaggaaatcttctagatttcttcctaaaagaggtttatactcctcagcatagaactacatgcaaccaatgacaactgagagaggggacatatatttcctctaactagttctctaatatcagtggtcctaaaataatttaaacataagcacagtaaatggattttagatatatatttttgcataaagataaccataatgactccaaagaagaggccatggattttaggaaaactaaggagcgatggaggagattggagaaaatgtctatgagaagagtttaaaagaggaaaggggaatggaaaatttgataattaaatatagaaaacacatcactggaaaaataaaataaatctgattttgtaaaacaaaaatcgatgacagataaatggtgcatatataaatatattactgatattgctgatattagagagagagagagagagagagagagagagagagagagagagagaacatagattcctaggcttagaagctgttctcataatttctctaggtcagtaatcatgcttgataaaacttaatccttattcttaggctctcacaatgtcacagtcaaactgtcagcagaaactggagtctcatttgagttctgtttggggcatggcctacagataggaggtgagaagattaatgaatgttattaataagactggaagtgagacttcagagcagagagagcctcaaacaactgtagggatctttaagataatttgccttcactttgttttgaatagatttaaaacaaaaactaaaggtatttaatttagggcggtttaacaaatcagtgattattagaatgatgccaattacagagataatcacacctgcatggtcatatggaaaaggcaagagctgaaccatcttacaagaactaccatattggagcagaactgggaaatgtatgaacacagcatctcctggattggttctcatgtgactgaaatggcagctactttgcaaactgaggcaggaggagttcaagttcaaggtcatcctgtgttaaaaagcaagctcaaggctaatttatttagaatatatctcactatttaacaaagagacgatggatacaatagccatctgcatatatggggaccaggggttaatctgtagtactataagcaaataaccctgagtagctataataaaaccagaataagacaaaaaggatatcaacaaaataacacattttagcaagtagtatctgtgaatcattttactaataacactcatactaatgttaatattttaaaatttggatctttatgttagttgcagccacctagttttttgttatcttctagaagggccagtggtggtattatttctattttttgttctaaagtagacaagatcttgtgtattaggtaacccaaagtcatacagaaagaaagggagcatcaaaaccctaacatctttagaatacgtcttcagttatgccctgcatctcagccaggaaaggaagacattgacacacttttgtaaaatctggaaggggttttgggagattctgagtgaatttttgtcatggccaaatcacctataatctataaaaccatcagagttgcaatcatttgttgatcagtaggctttatgccaggctctttacttgtactaattctattttcaacattccccaacttccaacattaatgacattcctctttatttactgagcacaagagtgcactttccttgttgacaaggcgtgcttaccttatttgaaagtaatctgcattcttttcattatgcttgtgaaccctgaaatgtattagttcttcttgtacctagcaagtcagagaaaaacattctgcatatgggtgatcatagggacaatcccatatccgggttcacatgcatatatgacagaaagcccttttaaaaggctatggaagagctggagagatggctcattggttagcttgatgtacttaacctagggccctgactggatctctagcagccacgtgacagctcactattttctgttaacaccaatactggtggttctgacccctccctcttccatagtcatagtctgcaggcattgtataaatatgcaggcaaaccacttatacacgtaaaataaaaataaatgaatctttttaaacagagggtatagatttgttctaattaacttggtcattttagcacaaggctcatctcatcaacggttttccgtgtaagtgtattgtctgcaaagagagaaagcttccattttatgtgctgaaggcaatatggactgaaagccaagggtaaatggaattttacatccagcccaatatgtgctgagtggattagcctttgtggattgtttactggactgtttcatatattgctctctacaacacttatactgctgagcagaaagagtaaaccactttctttcccaagtggtaaaattcgacttgaaccaacagaacagcatgcacatattttttatcaattctttttcgtttggtagtgcacttgcctaaattgattcattattaagcacagaaaaaaacaagagaagggagccttgttcctgaaagctctgatggggacactggtgctggcaccagaagtcagttatttgcattttgctgtgtgaagcttaaatcaagggcttcaaattgcattaagaggattttaaaatcagataaatattttccttttccatctttgtctttaagaatgaattactgagaaaaatatattaaaaatacaaaaaattcacctaatcaaatttcattgctgtttaaatttgtctgtttcactttgattgctatcaggtgtttattcttcataagtaaatgtagtaaaaagtagttcaaaaggttgcatttcttgttccttgaaaaagttctattcgtccataaaagaaaaaagtttcaggaggaatgaagactatttttttctgggtttatgtggaccaatatccataaaactataaagtgtaaagggaatcagattaaaaaaattaatttctgcaaattcagtaatgatgagatttgtttgatctacctataaaagtactatgacttagaaaaattatagtctgtgagacatctaaaacctatatcatagactatctgtttcggttaattaaaatattagtcacacttcataaatatcatactatctatgtatttcctgtagataagttgtcaggagtggtgatgctggtaaattcatgataatatggagaggattaaagcaacactgaccccctttcatgtcagcactgaagtcctatttctgtgatagcacaagaagacgaagatttactatcctttgctggagctcttcccctgctcattatatgaaatagccaaagaaacaaatagcactaggtattttcataggcattgtgtagtatagaccacccagcaagaattgtgtttgaaagcaagtgactgttacagaacataattaatttaaaaatagctaagaataagcctggacctgctacttcactgatttcagaaacaatataggatgctattttcaggaactcaattgaaactagcgcatttggggaccttggaaggagaggtttagctcttttctatgagccagggaaggcttggttctgaattgggtctttatttaaaaagtagaatgccatggatgattttattacacagataaggaaatcatgaagttgctatttctggaagtctgaggtttctccacttttctccttctatatttccttataagtgtcacagtagttctgggttttttggtttgtttgtttgtttgtttgtttgtttgttgatgtttaactaaatttgattatatttctggcttaatgttccactcagtgaacatccacaaggaatatgtttgcttctgttttgaaggaaaaattattgacttgatcaggactccctagtgatgatctcctccactaaccttgcttctgcagccaccgaggacctccattttacccagctcagtgttctgtggcacagtgggatttactattctttgtgtggataaatatcagaaatacacttttgaactttggtttgacatccttaaagttagcagaaatgtatatgtatacatatatgtatatcgtgtatatgtaaatataaatgtatatgtgtgaattttttaaatttattgattatttactttacctaccaatatgaacctcccctcttgtcctaataacccctcacacagatcctgctcccatccactcctcccattctgatatgagaatagagaactccctctaggtatcgccccatgtgatggtttgtatatgcttggcccagggaatggcacaattaggaagtgtgaccttgtaaggataggcatgtcactgtgggtgtgggcttaagaacctcaccctagcagcttggaagtcagtattttcctagcagtctccagatgaaattgtagaattctcagctcctcctgcaccatgtatgcctggaggctgctcttctcctaccttgatgataatgtactgaacctctgtacctgcaagtcagctccaattaagtgtccttataagagttgccttggtcatggtgtctggtcaaagcagtaaaaccctaagtaagacacaccaccacctcctgaaacatcaagtcattctcctactgaggacagacaaggaagaccagttaaagggactggatcttcaggaaggcaacaaactgaggggcagccttctcttcagttgttggggtatccacatgaagaccaagctgtacatgtgctacacatatgagtggggtaccgtgtccaggccatgtttgctgtttagttagttgtttagtctctaggaacccataagggtccaggttagtcaactctattggtcttctcgttgagtctccatcctcttctggtccctcagtccttccccaactattccacaagactcctcaagatccttctcatattttgctgtgggtctcttcatttctttcttttgactgatgagcagagcctctcagagtacaattatgctagacttctgtcttaaaatataacagaatatcaatttttaagatttttattagatattttcttcatttacattataaatgctatccccaaagtcccctatatcctccacccactctgctccacaacccacccactcctgcttcctggtcttagcattccccttcacaagatcatgagcctctcaccccattaatgactgactagaccatcttcataacaaaatatcataaatagcatcagggattggctcttacccatgggtctcagtttcagcctgtcattggttgtccatttcctctgtctctgctctatcattcatttttgaatacatagtgctattacagtggctataaaaaggacagtccaaatcatcatgaaattctcgaggaaaatacctaattaaaaaaaaaaagaaattctcattaaaataattacgtattcatttattttatttgaaaattgttggtcatcatgtgattcatcttgttaattcttttagaattatcttaatattgtggagtgtctgtaatgtcaatcactgtataaaataaggaaaattttaaatgaaaaaaccagagcctttagtttcctaaagtctactttacattttacatgatgatgttagcagaccaggaaggaagacaggaagccaagatgctggaaccttatcacacacatcttgatgaccttaatgttctacatctatcacacaaaaagacttatgctgtacctcctgccaatcctgatacactactcaaatggtgccttctgttttcatgccatatatgctcataaaattatattatatgtattcttaaaatctaagtgctctctgaaagaaacagaaaatatgtgcttttctgactctggctcattttacttaatataataataactaattccactaattttcatacaagtgcataactttatttgtttttgaataaatctcccattagagatcatatctatctctatctgtctatttgtctgtctatctatctatctatctatctatctatctatctatctatctatctaactgcaagcacactgggtgcctgtgtttgtgtgtgtgtgtaaaacatttttatctgctcatatgttgatggatatttaggcttattctatatattggctattgtgaatagctgtacaaatgtacctgtgatatgctgacataattttcttcccatatatatgtaggagtgttatagctggaacaaataggggggtcaatattgagttgtttgaaaaactacatgattccgtctatacttctgcgcaaatttacattcttggcagcagtatgtaaacaagaagtatataataaggaagtatatttcttccttcttatctacagccagcattcgcttttatttattttctcagtgatagtattgagatgaaatctcacacagctttgtcttacattaccccaagggttggaggttgttgaacatttttatttcatatatatttttggccagttgtatttccttctttgagaattatgtgttgatttcatttgtaaatttattgatagaatagtttgtttttcttgtattttatacactaggttgtttgtgtttaggttttttttatatagaatctagatattcatctgtgtttttcatagttggaaatttttttacccattttgtttctgtctccttactttgcaaaatctttactttatttactaagagaaatgcctttcgtcaaaatttaatattgtttcatagacatcacagacctttacagaacaattatatttttattccctgtggtaatggttaagtttaaatgtaaaaatttaaaagcctagaatcacctatgaagaaagtctcaaatgaattatttttatcaggttggtccgtgaacctgtctgtagggttattttcttaattgttaattaactttgcacacaaaggcagcactattccctaggctggggcccaacattgtatccaactgaataaggtgagctgagtagcacagaagcaagaagcagtactactagttcccattgggtcttgactgcataagtaatgtgaccagctatttgaattcctgtgatcttaattctaggtcaaataagtgcttcctccacctctctgttgttttttaccataggattcaaaaggaaaatagaatacctcctatatgttggctaatacacttgacttaaatagaaggtacttccatgtgccctgtcaaaaattgactattgcctgagtgccaatcttagattaaatttcacttaccagtctttgactcttacataaaaattttccattttcctttctagaaactagcagagaataatttgatcaagataaagtaataataagactcaaagctagagtgtttttgtttgttttgttttgtggaaaactgataacatgaccccttctcccaagtctatagaagatagatgatacatgatcaacggttttaagtataaatcatatattctaggtaatgccaaactttgacctcaggtaaagatcattgcactctaagcctttgaatttgtctactattcacttaccttgttggccttgttttatttataacttttaattgtaaggttttctttagtaggcgaaacttttagttttgagcacactgtgataggggcatatctcttttacgggcttgggagggcttatatgaaaagtgttcataaacagttaaaaaattgaatgtgagttgtggtggtgaaggtgcatctattaattcattttgaagttctttataaaaatcaataataatgtacagagatcagttgtgttgtgtactgccaaaatggctgtgttcccttgttctgaaagaacttgtgatttcacttttaatacaagtagtgctgacaccatctttgggggtgaggaaaggaactccgtgactttccacatgtgaactcttgaatatctgaaatgctggagatttggtaagtgagattttgttgtggctgctgctttatcagtcagtttattaggaagcatattaagaaacatggtgctaaggctcaatgtaataagttaaaataatgtgatgagaaagcaactaaagaagaaaaaatgctgataaaataccctgtaataatttccctagggcctgcacttaaatttccaggcttgaaaggaagtacctacatgtcaggcggctactgtgagagccacatttccagcaagactgttatcaccctcttttctcattcttgctaattgtccttgtgaatgggtatgcatatggctatttatgaaataattcaagaaacctggtgtgtctttttcaaaccacatagaaaactgagaaagcatttggtatcaacacgacaaaacagtattaattttgtaagaatgtcctttgttttgaacctggatcacagaccattgcttggacatacaaataattttgtctttctagctttaagtagaatagcctgaaattaattagaaaaggacatgattgtgatgttttagcacttcaaaaccaagaaaccccaatattgtccagccattcagtctattatatggaagcatatttttaaaataaattcaacattaccatcattataatattataaacccacattttcatgtttatatttttgacatgtttataatatatgtagtggtcagcaaattttctttagtataatagtagataaaatactgtacactgcaaattgcttaatttcttgaactattcaatttgcagttgtaatatgtaagtaattacagaaatatttaaattaatgttcatagctttctcagtgtaaaacttattttaaaatgattgttgtccaacagatatgcccttttgatcatactgtacttaggctacaaattcagactgcctcaaatcagctatcagaaatttagatcatttgctactatcattacaaacccatcgagaccatctctgatttaattaagaattttaaaatatacatgtgcacattttaaaatatatttacatcctgtgatttgcatcttttaaataagatgtcaacttttatctatgaactttcccttaaagaacaagaatgtattttacttgtataactttttttacaacacgattggcatttgacccattagcttgtattttagttttgaaaacaaaaatcatcattggacatttttttaaattttttagatgttatctaagtgaagcatgcagaatatggactttgattttgagatagatagctatgaggttgctttagaaaattaagggtgtcattctgtgttgatatttctgtttgagtacaccagaacatttggaagacaattctcatcttttctttgagaagtgtatgcctggatattagaattgtaataatagagcctgtcttagttaggattttagtgttgtaaacagacatcatggcaaatgcaactcttatatggacaacatttaattggggctggcttatagattcagaggttcaattcattaccatcatggccagaacatggcagcatccagctggcatggtgtaggaggagctgagagttctacaccatcatctgaaggctactagcagaatactggattccaggcagctaggatgagtgtcctaacactcatattgacacacctattctaacaaggccacacctactccaacagggccacaccttctaatagtgccactttctgggccaaatgtatacaaactatcacagagctataactccataaactcttatttttctggttgaaatccattcttattccaaagctcatccaatttataaatacccatttaccagtaatagtataacaattacattcacaagtattacccaatacaagtggtaaaaatctgtgctcattccatttgggaggcaatatgagaaagttgttgacagattttcatattcagaatgttatacatatgcatttggtttaagatcgcattgtcacattctaccttaaatacatctgttgtcttcaaggacagaagcaccatattcatttattcttcttacctacagaggtcagaagagggcattgtgtcgtataaaactagagttacaggcagttgtgagctacttaatgttggtgctgggaatcaaacttgggtcctctacaagagtaatatattgccaaagtcctgattcagcatgaggagggtcctgagaaagatgcatatgggaacgacaatgatttaataatgactcagagtcagaattagacacaagctgctagttcaggtactctctatgttccctgataattcttagtattctttattcttcaacttcagcttcagcttaataccttgatagtttaatccttcaacttaatagcttgataagcagagagatcctgaacacagtcttttatttactaaagctacatcatcatcaaggcttttaacattgttaataattatcaagaattcttaaatttacataaacactatgagtccctagataaatagtcccatcctctgtttctttagagcagaaccaagcacaaagcaaaagcatgtttccttctaggtttatacaacttattctttactgtggctggacatcgtttttctagtgttggggtagagcagacagcagcctttagtaactgcttccatataacaatagaaaaatgacaaactactgaaattaaaatgatttcttacaaagttttgactttatttaagtaaaacagtaccagttagctctctctaatatcttcccaggtcttgttatcttcaattcatcaagcaactagaaaaatgtagtgctaacttttaacatgcttctacatcatcttttaatcatctaatcttcatatccttatcctagcaattccatagtctccttctaatgctatggatccctaaattatatataattttctatattttctatccatgtcctttcttcctgagtcattctaactctatgtctctaaattcatcctggctacatcaatgcagccgttattagatcagagggtacatgtgcttcctatgactccaaaatcaaggccaagtctggatatgaaccatttccaaaaaagacaatgtaagcttttatggcccttgtgattatattgtctagatcctttcccatgaccttaaaggccaagtagaaggcctggtcctggtcctccatagttgcatggccatctccatttctcattcctaaaaactacatctgtttcagttactatggcatcattatctctaagtaatgggggaaagaaaggaagactgaaagtaaagtagttgcagatcaactttggggaaccagccaccatcagaactcatgttggtcataggatgaatgacctggcaatgctccagggacaagaattgtgtcagacattgtcttactaagccatgctgagtaagagtatgtgtgtgctcttaactgatgatccatctctccagaccctctttgccatttttatttatgtgtaataagcatttgtaaataaatgaatatattgagacttgccagtcattttttttttattcattttttctcttttcttgtttttacagcataagtactgaattttagaggaaatagagaattttggtctgcacttgtactgtgttattcaatacaaatcaaataactgacatgtcttactgcttgtctcacatcttcatgaatggagtttggtgatcaccaatccatctccttatcttcacatttttcttttaattttgtgcattttaaatactatataattacatcacttcctttctttcctttttctccatccaacttctcccaagtgtccttcctccagcatccttccatgctaccatcactctgaagttgatagcctccttttcttttattattattgttcacatacacacacacacacacacacacacacacacacacacacaccaatttttccgttaattttatgttcattatcacatggtacagttcctctattctttcttcacacgttctattttacaagccattagctcttccttataatgcccttgggaatttttgcgtgtgttctcttttgtttctgtcttgtaagcattagaaagaggtaaggcaactttgcatggcatgcaaccctgagatctctcagatactgagtttctaaccagctgatatgaggcccctgtcacatttatagcggaggaatacctggtctggcttcagtgagagagacttgaggctccagggagtggaaattttggagaaggtgaggatggggcaggtggggacatcctcttgaagacagggaaggaaatgtgggatgaggaaaagtcagaggatggaacaggagggggataacaactggactgttaaaaaagattaagtaacaacaattataataataatcttcttttaatactgctcagagtttgtttattcctcaagtgattattccctctccacttcagtgttttgtatatcaatgacaaagttgtcatggaaactcagctatcacatgccagcatcatatattgaagtctgtgtccagtagtttatttttaggcactgattaattcattcttcacaaactaatctagaagttttgttttctgatttatgtattaccaccccatatggctttcctcattttttttctaaataatgaaaatatttagccacacaaatgaaccatgaacacatttatacacatttatttagcattagaaagaaggaaggccactcatagttttcacacttcttctgagactggtatgactgcttgactctgtaaggagatgagtaaagtttcctgtaaaaagtgaaagcagaggtgatgtgactgtgaggtcaatggcaagaataaatacatcagtatgtcatagatgcagcagcagaaagacatgtttgggaaaagtttagattgacaactcaaattcttctgcctagcttccaaatgcaccacccaattcccagctcactcctatggttctcccagttttgtgtttcaccagcaaaaggactgacaagaaaggggaggagaagacaaaaaagaaagagaaggggcaatctgaacccactgccacaaaaactcaaaaatgcacttccctgtttttggcaaaccctgtaagctggagaagataactaatttccctttgtcactaatctagctgggacccacaactttgcagctgtcatatgtgacaattagaaatagcccctacattgtactttcctaaactaaccaaagtttcacttgcctgttgttaatgtgcttgcatctaaagctggtggcaatactatttttattattttctaactattatgtcaatatataatatgttgatctttaagtgtctattgtttattgttttctacttattcttctattattagaccatatagcataacacattatgttggggaatttttgtggtttttggttatttgaactggattagaataaattgagtatacatgatactgttttgtctgtcatgtcaacatatgatgatataataatttgaacttaaaagttcatgatatagtatataatatataatcttctattgtaaagttgaaaatcccttcctatatcttgttctactacatcaagggaatttctgttatgtaagattttttttttgacctggaggataaaactctatacaattttaagggtaatataaaaaaagactttctcaaattttccttcaggtgaaacaagacatacaataggaaatttgtcagttctatgttagtaaaacaattatctgttctatacaaagggagcaactatttttttcttttcttttaatttaaaattttgtttattatttgttcatgtatgtgtgtgtatgtctgactgcatatggtgtatgtctatgggaaattggtgaacttctggaagtcaaaagacagttttttgccgagtcactgcctggcacgaggcatattaataaggtactggtagcataaccaatcaggtatggacacgtcactcctaggcctatataagcagcaccatttctggggctcggggtctttcacctacgcagtccatgctctcccaataaacgtgttgcagaaggatcctgctgtggcttctgctttgctggtgagttgggtgctcacagatgtcttttctttccttccaacttagttcctggggactcaaagagagatcatcaagcttgaacaccaagtgcctttatccacggagacatctgtaatgaataacacacacacacacacacacacacacacacttatatattgtatgtgtgtgtgtgtgtgtgtgtgtgtgtgtgtgtgtgtgtgtgtatttctttttgaaatcctaacttctatgactgaattgatttcacggatacatgccacttattttgttatcagtatcgcttggtttctactaatctctcccccttttttcaaaattttttattagatattttcttcataaacatttcaaatgctttccagaaagtcgcctaaaccctccccctgccctgctcccctacccacccactcccagttcttggtcctggtgttcccctgtactgagacatataaagtttgcaagaccaaggggccacttttcctaataatggccgactaggccatcttctgctacgtatgcagctagagacacaagctctgcgggtactgattagtgcacattgttgctccacctatcgggttgcagacaccttcagcaacttgggtactttctctagctactccattgggggccctgtgttcaatccaatagatgactgtgagcatccacttctgtattttccttgccctggcctagcctcacaagagacagctatatcagggtcctttcagcaaaatctcttgattttcccaaatatttccttggacttctgactgaatgaactgtccaggtggagcatggtacatcatagtaggcctatataccactgaatgattgactaaatgattggaatggttgactaaatagtatacttatcatttagtatacccatactcatagcattagggagcaactgattggtttactgattttggaagctattcaagagactgtcaacaactgtgtatttcttgccttaaggaacttactgggtaagattgcacattttttctggattgactggctgactgactaactgactgactgacttattcattcattcattcattcattcattcattcattcattcatnnnnnnnnnnnnnnnnnnnnnnnnnnnnnnnnnnnnnnnnnnnnnnnnnnnnnnnnnnnnnnnnnnnnnnnnnnnnnnnnnnnnnnnnnnnnnnnnnnnnnnnnnnncattcattgatagtctgtgcagagtacttcataatgttcttgactataaggactgacccatgtagccatgttggcaactgttcatcattcctgtggaagatgagagtgtcttggatgagaaagcaggtattcaaaaccagccttttgaagctcaaagtgctttctattacagtacagttcagaatctctttaccttagggcatattttatcaagtcagagcttcagaatcttattccttctattccctgattcttactaaaagaaatccaaaaacaaaaaaacaacaacaaaaacaaaaaaaaaacaatgcttttgtttttctgacacttgacttacactataatatatttgataatacattttgttttgcttcatatgagaagcaaaaatctattggctatctaaatttagtttttggaatggcctagtcttaccaatggaagtacctgactcagactcctatagggtacacactgggactgagcaaaattatccaatccttgctttaatttgcagtctaacaagagaaggagtaatttttagggagacatgaagtgaagtattcccttgtgctttcctctcagttttcccatagggttgaaaggagtgaataaataccaatttggaaaaaaaaatagctgtcatgcccctaatgttctgttttactaactcaattctgtctagaatacaaattttgcctgacatgtgccatgctgttggcttataaacatgaatactgaaagagatccacaaggactaaaagatcaatggactatacattaactaaacaagtttcaatatgccttaatttgacttgggcatgatttattgcctaaaataaatagaccaaggtctgttaattttccctgaggtccttgcattcataatcaccaccacagccagtttttttttatttaataccatgttactgctgtatacctttttatgagttgacagtatcctaaaattactttttttcagcaccatgccatttgtatcattttagatgaaaagggcacagggctttctgaaggtcaatggaaaatcacgcgaacagtgtaaatcatcgaacaagggaagaccatctattgtgttatgtttccttcatgtggcaagtatccaaatagcccgttcctccagaagctaaatgtatgtagtgactggaatatgtgtgccaagatttctagattcttggggagattaataatacttcaacttgcttttcctattcagcttgaggtggcttacttcttccttgcctttaaatttaagaaaataagcaattctccatatctattaagcactaggatgatttattccaaatgttttcactgtatgacacagttgcagtcatgaatatcacatgaccttggaaaatcccttaggaaaatgtgactgagacaactttacttccttggtacaacctctttagaaatccgtgatgataataacttaatctacaagcaacaactccctaggaaaaaaaatctagaaagattttgttgttattgttaaaaacatcaatgttaggtaaagaagacccatggttctctaagaatgtgaactgtggccatttctgtgatgcagagcattgaaatgttcagtgctgcctgtggcagggcctgcttctaattgtctcacaatgggtcttcaacaatactatctcagaagggatcatctcagaataaagagaggttcttacacaaatatcaacatgaatgtttatcatacctattattaagcatctaagaaaataaattgtaaaatgtattttctgtcatttgatggttcctagtcttgtcccaaccatataggataaatttggatttagatgagaagagctgaaatttatttgttgaaactaaacacaaaattgatgatttttctatccaatgcatgaaattttatttatttcaaacactattgttacacatattgactcatataatcactatttcaggagatttgtttttatgtgtgctggaaattgataaaatactctggatccaaagatgattggattgagtgtgctgttacatcattagcataagatcgcagtaatttctgtaagaaagtacttggtgcaatgaacattccttttagcactgctttaaatgtcccaaaaggttgagtatatgttgtgcctttgtttcactgaattctagaaaggctttaatgtctttctttatttctttcttgatacagttttcattgagtagagttgttcagtttccaagaatttgtaagcattctgttgtttctattgttgtagaagtttagctttaattcaccgtgatctgacaaaatatagagtgttatttcaattttcttgtatctgttgagacttgtttcatgacaggataaatcttgaattttggagaaggttccatgagatactgagaagaaagcatattcttttgtgtttgggtggaatattctgtagacatctgtttgatccatttgatccataatatctgtccctttcatatctaataatctgttagtttcatatctgtttactttctgtctattgctgagagagtggttttgatgtctcccacttttaatgtgtgggattcgatatgtaatttaatttttagaagataattttttttaacaaatgtgagtacctgtgttttgggaactgagatatcatcttggtacagttatccttagatgagtatgagatgaccatcctcatttcttttgattagatttggttgaaagtctattttattagatattagaatgacttttccaacttacttcttggattaatttgtttggaaaacctttttctgccctttcatatgatagctcattactatcagtatttttgaaactgaggtgtgtatcttgcatgaagcagaatgatagatcctagtttttgcatccattatcctagcctgtgtctttttatttggaaatagagtccattgatgttaagagatattactgatcaatgattgttaattcctgttattttgatgttggtggtggtggtagtagtagtagagtgtgtgtgtgtgtgtgtgtgtgtgtgtgtgnnnnnnnnnnnnnnnnnnnnnnnnnnnnnnnnnnnnnnnnnnnnnnnnnnnnnnnnnnnnnnnnnnnnnnnnnnnnnnnnnnnntgtaaagctgtatttcaggatagttatctttttattgaatgtattaattacttacatttcaaatgttaactcctttcccagtttcccctctggaaccccccattccatcccctatctccctacatctatgacgatgctcccccacccactcactttcagatcaccaccctggcattcctctacactagggcatcaagccttcacagaaccaaggacctcccctcttattgatgccagacaaagccaaggtctgctacatatgctactggggccattggtttctccatgagtactttcattggtggtttagtccttgggagctctagagggtctgattggttgatattgttgtttttcttttggagctgcaaaccctgtcagctccttcagtcctttccctaactcctccattgtggtccctttgtcagtccaatgatcggctgcaagcattcacctctgtatttgtcaggttctggagtatcttgtttcattcatctatgatgatgaaagttttgctaggtatagtagcctagggtggcatttgtggtgactttaaggcatctgtccaagcccttttaaggttttagaccctctgtgaaaaactgagtgtaatgctgatctgtctggctttttatattacttgacattcacccctttcagcttttaaggttctttcttagtcccgtacattcagtgtttcaattattatgtgatggggggagtttttttctggtccaatctaattggtcttctataaacttcttataagtttataggcatctctttctttatgttgggaatttttcttcatcatctaatgaaaatatttttaggaccttggaacagaaatcttcttcatttattcctagtatttaaacctacttaggtttggtctttcatattttgccagattcctggaggttttcggttaggatctttttaggtttaacattttcttctatggtatcttctctacctgaactcctttctttcatctcttgtattctgttggttgtacttatgtccacagctctttgtggcttacctaccttttctatcgacagaattacttcagtttgtgttttctttgtttctatttccattttcatgccctgaacaattttattcatttctgcacagttttattgtattttgtctttctttaaggaatttattcatttcctttttaaaggcttctatcattttcataataatggatttaagatcattttcttgtgtttcatctgtattaggatgtccgtggcatgcttggtaggatagctgggctctggtgatataatattacctgggctggtgttgatactgttgttatggtggtatccagccatgtattgtgttattatattattgactgttgtggttattataggttcaaaagtgcctatttctgatttccttttagttgcatgaatgatttttggatgatttctcccttgatttttttttttctgctcagttcggtgacctgagaaccctggtgttctggtgatcagtaagtattcaggtctagtatggtgtctccattggggtttctgtagcctgcagtgtgtgtgtgtgtgtgtgcgtgtgcgtgtgcgtgtgcgtgtgcgtgtgcgtgtgtgtgtgtgtgtggtatggtgtgattttgtgtgctatagttacctctgaagttcctattagcagcttggcctggccttgggtctctgatgcctgtgtggcctccagcaaagcagataggtttgtgggccaggaaatggggcacagagtatgggctgtggtttactcctgttgagtgtgctttggggggaggtggcatgcaagtacttggggcaaaatttcttaattggtgtccctagtgcctactggcctccagaaaagcaggcagatttgtggacagaaaatggagctcatggaatggagtggagtttactgatattgagtgtgctttcagggatgttgggcagggggctcttatctagtcttgcatattcttatttttaataaaataaattaaataaaggagatatagtgatataggtgaaaaatatttacacgtttgaaagaaatatcattttattatacttataaatgtaaaaaagtcttatttcttgcactttatgccataattttaactacaatgttttcaaaaaatgagattgtcaaaaatgaccataatcctgaaccatggaggtatcaatgagtacctaaatttcaccaaagaatataaagacttttcgaagtttgcctcccttttctttaaaaaatttactttaataaacttggaatttaattgttttatttcagtttattagccctcgagattgtgtatattctctcagcctcttgacagttttctaacctagaaatgggagtcagtattaaaaatgcaattataagcaacatagcatgatttcaacccagagtctgtggaagttggtgagcacacacattggcaatcaaatataccttacttgcaattcctgtcttccctcgtgttctctagtactttgtcattgtcttacctaaataccttgccctgtttcatcttttatttcactaggtttgatttcaaaccctattcccatcataacaagtctcgaagaatgtctccaactcccatttcactctatcttgagcaaaatgtcttcaacatctttgaaaacccctaaaacacattgtgttttcaagtctatatatttcttttcagtgcatttctatacagctatgtgtaccacaagatataagtaaaatgttttctgtatattctttttttattttcttctggagacaactattagttaaacaatataacacacaattacaatgtgtgaatgttggcctctgtcatcatttggaaaggccagaagggtgtattcatttttgtgttattttggtaatatgaaggccatgaaaattaaactcagctgcagtaggaggcagggcatggtaattaatactcagttttgccagtcagtattggtatgttggctccaaattaatccaggatgttttacaacccttaattgctctttgcaaaatatgatcatgcacatttggccatatattactagagatattgtttccaaaaataattttattagtctctgagtgttaaatggcttggaatactacaaaaggaggaataagtgataactgaggggaaagagaacacaaatttcaatgacaataggcagactttgtaccaagatatattagaggattgtacatacaaagacggggcatggtaacttgtaggagaaagatttggatgattttcaggattttgcaggttatagatgcaaattgggacggacaaaacggagtttgctcttggcaatgggtcttagaagagattttgtgttgtgacatattttacttctcttcttatttgtttcatctcatgaaatgaagcctcctcctttgtaaaattgaatgattcccctgtggccttctctgtgccagaatgtaatatgccaactctctgggcaagactaaatagcatccttttgtaaaatattaaataattttgagggctttaaatagttttgtttctgtgtttgtggtttattttggctgactaagaagaaaataaagattgattgatatgttatagaggaacagtaattagaaaaatttaaacaatagtctgtaaaaacaggaacaaagaatcttctataagtgtttttgattggtaaaacatgaaataatcttccatacatgaaagaatttgctctgctataagaacaattacttgcctcataaaatcagacttgcttaataaagttagtgcatttcagcttcttctgtcctggtgataatgaatagcataagaatgataaatgatcatgaaattgaaagcagattggcttgaattttgaatcatgtcaggatcaaatagcaaagatatacatttgaagggttaatgctaagtgttacagagtaacattgttgccatatgaatactcacccagaaataatcaggatttactttgtaggttcacacaatataggatgtatttatcctaaaaccacacaaataagcaaaaagcaaactatcaaaaacaacaggaaaaaccaaaggaacaaaaagtctgccaattcatcaggaaccggtcagttgttcttggctgactatccatgtatctcaaaaaccctgaactatcaaatttgtctcaatcaatatttcctaatgattttagcaggactcactttctattatgtcaaggaaaatttaattttatatatacacgaacgacctttacaagtgacatgaggtagtgtcacaaggtcacttttagctttagattgctgtgaccccattctggctgaggctgccttactgattttacatagcttaaaagccagttggctcccaaactgactctcagtgctttcttcattagtttttttaaatcaggtattgggcaggacattttttaaaaattttttatttttcagataattccagaagttgttttttttttttaaaagcatagtataccagacattattctttcaaatctagataattccacattatgttttaatataggaagtagttgatcttatttatgtattgtaagaatcactcagacatcgttaggtcatacaaattctaagagaaaaataagacaatatcacaaatctcttgcaacagtcttagaaagatgacaaagcatttgaacgaagaagttagaattggtaatggggagccatgaatagatttcaaacatattttcaacgtaaaactaataatgtttggtaatggatcagactgaggttgtggaaacaaaagtgtttgtctgttaaagtaggattagcaattaatcagtcagaaacaaatacattttggattagaagaagatcaatattaacttattagactttacaggttgatatctaatataaaaaaaagtaggccatttgtaggaaatttacttttcagcaaatgagtagaaattgaatttgtatacccaaatggaaataagtgcagtaacaatgaacaaaataagagaagacatatgtaagtagacgttgagatgctctatttaatacagatatgggcaatatgataagtccagtaaaacttgatacagaggttgggacaagggtagtagaaaaataagtacaagatcttaaatgctaactaaggtacacagcccttatagtactgaactaattccacctggacttggtgacaaactaactgctgggcagtaactagtaggcatttcaaagtagagataaatgaaagtttttaaagagtagtttgccatctcagggattaaaatacttcttggtatggggccaagagaatagaccaaaagacctgtcaactgctgacataaacaattctttccaggaaacttctgtaaggaaagccataagatgccacagagagtagtaagggagtgaggcaagagtgcctcaatgggtttatgaaagtcaactatttgaaggcgatgtgaagaacagcatcaagaaaatgctgttctgttctcagttctagcatctttcactggctattgtgttcatggttctttttttgtttatttttttttgtgtggttgttactgttgttgttttctagttgtgacccatccagcttgaatatatcctatcttctgacatcccgtgtctcaggcatcttctaacattgagttggacctcaagagtccactgaacctcctgccaaccagaagaatatgtttcatgtcctataatggtgacatccttccacctgcaaacaggccagcttggagcctcaaattgactaggttggaatcagatgagctcataattctgtacaaccactttaggctcagcacagttggatttactacagctcagccatgggtagcacttgcaatataacttcaccacatgtacctctttgagttttgatttactcgaaagtggatggatgttgactgcaatgcaaacaaatgttctcctccaaaaaattgagcataatggctgcactttcccttctcacacatgaactctcgctctttcaaactttagtaccacttctgagacaattaagataattcggccatttaaggactaacagccatagcagtcttagaactactgttttgcactaaaatgcactaaaaagctgttattgcttattggaattttaatgcttctttatcgggcaagagagagtgttggagtttgtatttgttcttaagaaatactgaaaagcaagaataaagaaaggaagttcattaaaattcacttcatagtagttttgcgaatatctttctggtgccttggaaagcctgtacagatttggacagaaaccttgatgtcagcataggaacaattttaaaagaagaaggacattacatataagataaagtaagggtctctactgtttccactttgcaaagataagaaatcaactggaacatttctcagtgttctaactgttctaaaacagttttccatcaatcatcaatcagaaagcccttaaaagctgtagtcattatcctagaagctaattatgtcctgtactttgggaacactaggaggagcactacgcctatgctatgaatgatgggagaaatgctcagactttcgaggagttttatgttcaggaaagcatgctaacaaaggtttctgatgatgaggaaggaggcatgaaaggatgtccaaaaatagtggaataattagaaggagccattctatggctcagtaaaggtcttttgcttttactctaatgccccaaatctttcaaagagtctgaaatactttagagatctggctttggaatatttaaatgaaagatgtttacctagtatattttagacaagcatcacaaacatctgaaggctccaaatacagaacaccttaggcccaaagtattatagataagggatgttgactctctcccaactttgtcatagcttaactgagaatgctctctaagtttgtttctcttaattagtaaggtagagtcaaggacacaatgatcaaaaacatagggactggagtctgcactatttaaaatgcctcatgtgtattggctaacattctcaataacataggtgttcatttagctgcattttataggttatgaaaaagtttatagtacctagggtctctaaatgagtaggggcacaggttatgctttgtgccaggtcagaagtaacttgggagtacattcttctaaataattcccactggggtcatcagaggaagttgcagaatgggtatgggtaaatatccaggcctaactgtgtgtgttgaaaactgcaaaattcaccaccaatggagaggaagcctggggactcagtatccctgtccttgaattttggggcctccatgcctctgttgtaaatgtgtcctcattcctggagggaagtctttgttcatgtatcctcagtcaaaagttggccaggcaataccgtgacaaataggagtttcataatctggatagaaaaagaaagagcagggtggcaatcacctaagacgcgaagctgaaatgccaaatccaggttggaagaattgcttgtgctcaaaccatgtgaactcttctcagcgactgtgtgtagcccttgctaaaattgctgtcctcattccttgtgtctggcctttggctctgtgactgtattggaaaccttctctcttatttcagcatcagtagccatgtcaaccctggagcagcctccaatatactcttctcactttctctgactttatctgaaaaatctgtcacttgcaaaacttttacaaagccactttcctccaatcaacaaaaggaaaccacattttctttcctttgatataaagagtgtcatccttttcgggctgctttacatttacaaatgtccaggtagttaaggacatcagctggttggcactttgaagttgcatttcccagatatatcttttctccctcattttcttttccttctctttctcctcttttctcccaaccctctctttttcttattattcctccctactttactctcattgttccttcttctctttataatgaagaggtattttgctactaacatgccattgagagttaaatggtccctagaacccagtattactggcttaacccttgtaagtagtattatcattctattctcatgacctgagtacaatagaatgtatctaattctatttggactggttttgcttctgaatggatgcattcactgtagaccttgtttcttactcccccagttttctggaatatgactctgaagtaggctcagttgtgcccgctgaggcgggaggtggggggaagggtgataattcaacttgttaaacagaggcattaaagcctccttcacaatactgctgtgacaagggcatattgaatatgcgctggaccaaagttagtgttcctaagtagtgacaaaaaactgtccagacttcattagaagccgggcttaggagtttacctgtcagcactctgaagtctgagacagacattgagttcttgcctaacttgggctccatagcaagaactactctcaaatcaacaaattaaataagttagttgataacaaacttgatataataggtcttcaaaacttgacctccactagcaaattacttaatcatctctaggtctgtgactcaagatggctgctagaactccggccaccaacttgcaggcaacaggatagagaaaagtattaagaaatagcactctttattgccttgaaagcaatctgatagaagccaatcatagctggcactcagtgtatgtccacacacacactgtagaccagggtaatatccagtttcctattaataaagtactaagctacagtttgagattcatattactgaggaaagagaatctgcaatatgtaactctggaactatgtaactatgtccattgtttaattcttcagattgaaagtctgaatctttaccaagttctattcttgcctttttcttttaagtttacagaagatagaggatatgcaaaggttatgaagaggatgatgttttatagcctcagtttagcatgtttttgtgggtgcctgcttaccaggaagagtaagtgaattatgagctaaaagataagttacatagaggatgggagatatacaaaaaatgaatctgagcagaactcaaaagagagtttatagccaacactagaaaatagaagcagagcaggctgacagagggtgagggatttttttttttttttgaaaagagaattcgttattggatattttcttatttacatttcaaatgttatctgctttcctggtttcccatccaaaaaccctctaccctccccccactcactcaccctgctcatcaaaccattcactcctggttcctggccctggcattcccctacactggggaatccagccttcacaggacaaagggcctcttctcccattgattcccaacaacgccatcctctgctacatatgcagttggagccatgggtctctccatgtgcactcctcatttggtagtttagtccccgggagctctggggagatctggtgagttgatattgttattcttcctttggggggggtggttgacagaccatgctgtttttgtttttgtttttgtttttgtttttgtttttgttttttgagagagagagagagagagagagagagagagagagagagagagagagaatagacagatccattttgttccttagctaacctagtcacagacctcattcagtatcactaatgagaagaatcaaaaatcatgattagctgcacatataatgagaattggtgtttaatgaaagagtatagttattaagttaaaatgagtactgtatgctatatcaagacacgatgatctagtattgagtatggacaattgacatgaaaaggcatatgatccttgatctatacaaaggaacaatggtgaaatatagtgccctaaattgttctttgagtcaaaaatgacatcataaagatgtagacacacacacacataaaacatatggcatttgtagttgaattgtttatgttatggttgtcaattgacaattctcatcatcttgttctgagtctatgcttgactagtaaggtcttgtgctgctttcgttcacaaaatataattgttggacttgtcaaactggttcattggtaaaatgcttttctggaaaatgtgagaacctgacatcagaagttcagaacacaaatgaacttgcttatgctaactagtatctgtaatatcagtgtccctagtgaaaatttggaaggtggagtcagaaaatttcttgaaagccaataggccatctaccctgattttcatggtgctagccaagagacgtgtcaaaaaggtggatagacatgactgatgcctaaggtttcccctgtcctaattgcatctgattatacacatcaaggaaagcatacacttgtactcatatacaaccacacaccattcacatacacacacacacacacacacacacacacagcttagacaatcatgtgcttccccatgttgactcagataatctgctgcttggctatggactaaagggaaatgattatctcagggaaattccaaaggaaatgtgaaaatatatgtcaagaccaggactaaaaagatataaaaaatgtagatttggcctgaaaaaaaatggctgcaatatgtattttaaaatgtaattcaactccggaggctttaggtatggctaacaagggaaaatcaaagttgaaatatcggagtcctttccttcttttcattatagcatggtaacagcacaaaagtaccaaagtctcttgtaaaataccttgaaataaaatgtggaaatactatgtataatccatgtgaatttgaattcctagagtgtttctataagaagagcatattatatttaggaggataccattcactaggtaggaacctagccagatagcacattaaacgtctttttgttgccagagcagacatgaaagtgtatggaaattttggggaacctcttctagcacagatgagactcactctaccaggactgactataacagctagacataaaaaagaagccatttcaatctacagaaacagattcatctccatcgaccagatagatgtgggcatgtaataaataaataaataaataaataaataaataaataaataaataaataaataagatgaggttgaatctactgaatttctcttgaaaatgcttccaaaatttatctgcagagtctaacccttgaatatctctactagtatctaccttcatgtttctgtgttaaagaaggtagttcagtaaaatttctctgggctacatagaaatactcagctttaatttccttttcctcatacactgtgattttgccatgttttcttccttttaaattcttgagtccccatcaacttagtgagtgtcagtgtgtagcatatcttttataagttccccctgtgttcttatattcatcgattatgacctggcccacacccttagcagaatgactttgtattcctaatactcaccaggttacaaggatgcatttttttttaaaaaaagaatcttgttggaaagcgttaatatctcagaactttttgtcattctagggaagatctctggggagacttgagatctagaacatcataggttcccccaaagtgagattattcttggatagtgcagaaatctataatgaataggaacttgaagcctgcaactgttcatggggagagtaattctctggtgatttcttcccttttaaagtcgatggtactcaggaatataaggcaatagatctaaacattaagatcatctaatagcttagggcttattttgggcttaaagaagattaagaatgacagaatttacaggcccacattttgacgtcaaatccataaatgttcagtgatggcatggctcctttaagcttctttgtttatctttatggaacacatatgctagaactcaggacataactacctaagagtctgtctttccatttgtacataataaagctcaattgttttgctttgctatagcaagattgtgtacatctgctgtgttgccccttctgatttcataaatggattcaccaacagcattcacactgtgcacatctgctactctagtatgttttctcccataaaagcagaatgttgtaaatcttggtttctcaaaacaaacaaacaaacaaacaaaagtgggatggagggtggagattgtcccctcataggttttatgtgaaaactactagtgtcaattaggaatccacttaatcagaacagcagtttaaggaaacctatgctggcttcaaatgttgttttcccaaaagaaaagagatacttcctttttttttaaactcagattcatgtgcgagtctacattgcttgcttttaaaaatagtattccagctgggcagtggtggcacacgcctataatcccagaatttgggaggcagaggcaggtggatttctgagtttgaggccagcctggtttacagagtgagtaccaggacagccagggctacatagagaaaccttgtcttaaaaaacaaacaaacaaacaaacaaaacaaaacaaaatagtagtccatagtacaattaatataatagcctattttgttttgttttcttctaaggtctcagtaatctgtcttttcagactgtttgtttctaattcaattgatctctcacacagtcttgccttcttctgcattttatcactagagtaaaactctctgcatttctctgatttctttctatttcccccaaagcatggcattgagaattagatgcagtgatgcatgggttggatgcagttacttcagacatccttcaggcaaccacagataatttaacctaatagcctgcaaatattctcttctacagaaagttaaagtttttctctcccccccccccactttttgtgtgttccaatgaaagatggatttcaaggatacactatagaggctgtagtaaatgtgcttagtctaagctttgacatttgatttttgttttaaaaaggacctgccctttactaacttaaaagactctcatttttcatagtggcatgaacataattggccagaaaacgaagaattctgcaaggctctgtggttttaaaaatcactaagatcatctatgccacagggattctacctggcactcagcaataagtatttatttgaatgaatggaagaaacaagtaacaaatttattacattttttccacccaaccaatcggtatggaagtgtcattatgtagaagttaaagatctaggggctgggtgcagatatattgtaaaatatcccccagaattttacttacatgccagtggagtaagagagaaaccataaagtaacatgataaataaaacatgcatattaaaacattatgactcttacagtgccaagttaatagataacactcaatagaatgatcaatacatagtatgtatgtggtactttaaatataatgcacccaggaaaggcctcatacgttgctgtgtgagtgatcaggtaagagtcgtgtctacacgcagcacagtggcagattccaggtagaatatgaggaggggagtgggaagaaccttctcactgaattgagagcaattatacacctgctatatttatgatgcagagactacaaaaggagtaaagatggttataaagagagttaactccattgatagttaacattatcttggtaatagttcagttcaatggggaattggtttgcagaattttggttaagtaacctttcctcagactgtgaatcaggggaaaactatacagcctttttatccataaatatagaaaacatggggatgagttggggaaatgtcagcaagccacctttaagccatgcacccaagaatgctgttttatcatcggtgaaatgtagagagaagaaagggaattttgtttaagactgtacagttgaatgctatacgttttatattatatactattagtgtgtttaataagttgtcttcttatatttccaggattttaatcaaatacatgtcctcaaaagatcttactgcctcagcatattgatatatgataatattaatatcaattatactatatatcccttttcctaccaactcatgtggggtgtgtgtgtgtgtctgtgtgtctgtgtgctttcaacacattggatattttatgtggtgattataatgaagtatagagagaaaaaattttttttggttttttaagacaaggtttctctgtttaggcctggctgccctggaactcactctgtagaccaggctgtccttgaattcagaaatccacctgcctctgcctcccaagtgctgggattaaaggcgtgcaccaccactcctgacttgagaaaatgttttaaatattgatcacctgaaactttattaaagctgacatatcggttttatgtgtacttttaattcttatccaaatgagttacttttactattccttacttattattgctactgcaaaggttcactcttcaaagtggctagctgttagattctaattacagttcagtctttaaaagtccgtctatacctttgtcgagtgtctaatgtctatgtagggagaataattctcatacaagctgagagtactcattaataaaacagaattaataatgggaaatctcgcctatagatcttgtaaaaatataatactgcaatgcccaacaatattcaatattttttatgtgcaacttaaaccattgttaaacacaggtcaatcacatgaacaagtattgtcacttttacattttgggtacctggatatagacccaattagctgtttctaatctcagaggagagagattaacaaagaaaatagacaccataaactaatataacacaatagttgaattgtgttaaagtgctacactaacaaatttaacggtaatatggataaggaaggcgagccctaggatgaggaagagaccataggtatattcacaatggtttaatatgttgtgttacatgagttataagagaagtagaaaatcaatgtggaatattatttgtagataagaaatttaattgtttagttttgaacaagagtagcagttcaactctgatctcagtcgtttgagtattttctatgtgctgaatggtcaagaaggatagataaaacaacacaattcattaaactaaaaccatgttaaactatataataatctgataaggatgcatcataatttaaatttcaaaattagcctacacagagtgcaaatcttcatgtctcatttcaaatatgtaaactaggctgatgtgttttgcgactaagaaactgacattgttaacaaagcagaaaaagatgggtaccaggatataccattatgtaaacactaaactagtctctaaacttccaggtgttattttttaaaaattatcttgtatgaacttttgttagcttatgtttttaaataatttcatgcagctttaattgaaagctaatatttgagtaaataatgttcaaaaagatagtgaagtgataaatacaagtaaaaactattgaaaggaatattcacactcccattaaatctaaatatgggacaggaaactttactgtgaatcagggtacttgcctttccttcacaccatcagcattatcctttgtggcaatggtcctatgagatgctgatgggactttggtattctgcaggaaaagaattagtgtctcagagatgcctgtgtcatgtgacggttactatggcaactagtttgaggcatgccattgagttaccaagtaaataatctcataaagttgatattatagctgacatgtaaattaaggctgccctgtctctgtcaggtttttttctattctgaattcccttgctttccatatttaatagaaaactgctttcccttacaaaaactaaccgaacatcatttgaattcacagttgacatcctactgtttcttattttagtattccatactttggcactaatttttcaatactacattgaggttacaacaagagatcattaagttgttatacataagccaatagagttgcacttttctcagtgtgtggtgtgtgtgtgtgtgtgtgtgtgtgtgtgtgtgtgtgtgtctggggcacaggggtcaagatgagcaaatgatagaacctgcttttagaattttctctgccaaacttatttcttttcactttatggtgctgatttccatggcttctattttagtgtttgctacagtatgctaagctgcttgttaaaagctgtctctgtttatttctagaaacaacctacattttctcagggtgtatacatgtggccttcttcccaataaagcacttagatttttatagccatagatgcctcatcattcttaagagctgattttgattgttcaacataatccctattccacaggcatctcacaacattattttcaaatttgttgctaattagctttaacgtgcagctagaccaaaagatttacaatggaagaatgaaagagtcacacaaacttttttgaaaaaaaatattgtctttatctgtttaaatttttaattaaaaggataactatatcattctccacttttttccttccacccatcccaattccaccctccatccccttccatgtcctaccctttctttcaaattcagtctctcattttttattattagtgctatatgtaatatttatttgtgtgtaactataaacccattcttatatataaccaaaaatctatgagttttatttggatattgggaagtctttagcttagcaatatatagatgtaatagattattttgcatatttctgcaatgattgctcatatatgtgtgaccttgagaaaatgatgttcaaggacataagcagaaaatgaacatttttttccattttttattaggtatttagctcatttacgtttccaatgctatactaaaaagtccccccatacccacccactcccactcccctacccacccactccccctttttggccctggcgttcccctgtactggggcatacaaagtttacgtgtccaatgggcctctctttccagtgatggccgattaggccatcttttgttacatatgcagctagagtcaagagctacggggtactggttagttcataatgttgttccacctatagggttgtagatccctttagctccttgggttctttctctagctcctccattgggagccctgtgatccatccattagctgactgtgagcatccacttctgtgtttgctaggccccggcatagtctcacaagagacagctacatctgggtcctttcaataaaatcttgctagggtatgcaatggtgtcagcgtttggatgctgattatggggtggatccctggatatggcagtctctacatggtccatcctttcatctcagctcnnnnnnnnnnnnnnnnnnnnnnnnnnnnnnnnnnnnnnnnnnnnnnnnnnnnnnnnnnnnnnnnnnnnnnnnnnnnatattgtgtgagttcctttgtgaatgtgttacctcactcaggatgatgccctccagagccatccatttggctaggaatttcataaattcattctttttaatagctgagtagtactccattgtgtagatgtaccacattttctgtatccattcctctgttgaggggcatctgggctctttccagcttctggctattataaataaggctgctatgaacatagtggagcatgtgtccttcataccaattggggcatcttctggataaatgcccaggagaggtattgctggatcctccggtagtactatgtccaattttctgaggaaccgccagactgatttccagagtggttgtacatgcctgcaatcccaccaacaatggaggagtgttcctctttctccacatccacgccagcatctgctgtcaactgaatttttgatcttagccattctgactggtgtgaggtggaatctcagggttgttttgatttgcatttccctgatgattaaggatgttgaacattttttcaggtgcttctctgccattcggtattcctcaggtgagaattctttgttcagttctgagccccattttttaatggggttgttcgattttctgaagtccaccttcttgagttctttatatatgttggatattagccccctatctgatttaggataggtaaagatcctttcccaatctgttggtggtctttttgtctaagggccagaaaatactggttcagattgccctgataacgaccacctccaattatttccctctgcattctttatccaagcttccacacttgagttttttccctccattctccagattcagtctgtaaatattctaggggtaaggtagtggacatttaagggatgcaactgcatggggatttcgaaagtcttcttttcatgaatgagatatcgcaaaagtttcatctaggaaattctgtgtgtgttctgttgtatgtaagttactgtgatggccatttactgagaggatgcgcaatgaaatcatagaaacaagccacaaaattaaaaggcatatagtgtttcagataattatagcaaccaaatgtgtcgaaaagctggaagtatagggaaacagttggaatggataaggaacaacaaagttaggtttccttgtctttcatataatccttgatgaatagttaccaaatgaagaaatatggcatataggtatctgggaataaactatggatgcagaacaggcagtgttgttcagtagtatgtatttgtctagtgtgtgcaaggcctagggtttgatccatggcattgaaattgagagaagatttagtaagtgctgttctctctgactagaggatatcgtggtattaaaggcacaacaaagataaaagatgttactaagtatctgtagataaataaaatttcaattatagagctttaaaggatttggaagaaattcactcgtgcattttttatttataactcacagcttttcattggcttcaaatcttatctcaaaaataatgtaaatgatgcaaaaactgaaaattaaatggagagaaatagatttttctaaatttaccttgcagtctcatgtcctccagcaatcagcacctttgcctctagaagttccttttttcacaatgaaagatgtgttgctacacaattatgccatagcaggtgagaataaatgctttagttattttttgtgaaattgttatcttagcaaatcttttcaacaagtctgtgaagtgggtattttcccctctgttttacagatgagttcagaacgtgttgttgtttcaggtcacaagaagcagaagttaaggcttcttgatggttaagtatacccaaaacacataggtagtttttagaaaatataatttatttagttacatcaaaattgagattcatttcattgttgcttgttatagacatggaaagctaaacaatcatatgggagtgcataaataaaggtatcaagattggagctcaagtgaagcactcaaaagtctttactttggcattggaaatgaaatgttgagtccattatgcagtcattaatcattgattcagtcatcactcattaagtatgtcattcagctattattacacaggtattattatccatcaggcagcagtgtaagagatgaagataaattcttactaaaaccaactaggtctttgtctctacatagcatgtatgtagaaaaagagccaatcacagatgcttataaaagtagctttatttatttatttatttatttatttatttatttatttattttttgcaccagtgtctattagaaagaattgaaatcattggatagagtctgatgaggaatctttcacaaaaggagaacagctcaaatatatctttaaataataagaccttttaatagaggcctgggtaaatataggggctagctactggtaatagggaaatacttcagacagggtgaacagtggttatataggcagggctatgggacacattaggatgtgtttggaaaacagactttgagaagaatgagcacacatatgcatggtagcatctgtgcatatggatgcacatgcatatataaaaacagtgtgtgtacttctatttaattgaaagctttagctggagggcagtacggggatcttaactgaagtggaaaagtaaacactgctctgtagaacattacgattgggtgcaagggtgcaaggatttgttttggttttattcttagcttttattaagtttatttctgttacatacgttctcttcaaataaattctttcacatattaatcacctaaggtcttgtaggtactgtctatttgtataaacatcaatgtctacattcatgtggaatatcagcattcctctacttctctatgaggtagatttgaatgggtacattgtgctttctgaataattaaggaatatcactgggaagcaaagcatacaaactaccatgcaggacaggaagtatatgaagatttgaaaccagaatgatgcagtttagaataaaatgataccaaggttttccagaacaggagagatatggagggaattgtcctatacttaatccttctccccaccatcctttcaccttagaggcagtttgttatcaattctccagataatggttgttgaataagttctaaatcatcatctataatcattcatgtgacagtgcaagacaggaaagttgaaagcataatccaggtgaacaggatgatgtgatcaatgaccagggtgaaatatagataaaaataactatgcaaatggaaatcaacaaagtgaggaaatgactgaataaagagagtagattagttttagaatcaggctaatgaaatctctagtggatgcattttttttttagtgtgtttcccatcacagacatggttctgttttgccaatatcaggcacatgcaaatctgtatccatttcatgaacctttgaataaaattgacctacccttcccccctcactgctttgggggtaataaaatctgaaaatcaaaaactcctggagtgtgtattgatgagctgatgtttcatacttcatgatgagtgtgtctgtacacatatataagggcaaatgagcatacatatgcacgtaaaggtttgagtatgacatgaaaaatctcccttgattgctttttcacctaattgtttttatcaggcatctctatcaaactcagagcttgcagatttggctagtctttcaagctttctcaagggatctttatttcttctttcccaggtggaattgcaggctgctcccttgcttactcctccatttaagtgggttctgtggatctggtattcttcactgaatgacaagtgttttaagtgctgagctatctccctagttcaaacattgaattgattttttcttttatttatgatggtttaatatagtttcatcatttcttcctttcttttcttccatccagtccttctagaggccccctcttcttgtcttttaaattcatggtcttagttttgaatgtaattatatgaatgttttgaaaaagataatgtgtatgacataaatgtaaacattattttcattaaatgacatgtgtttaaaatgtattaatttaaaggagtgaaataccttttagacgtgacagataaatcagaaaagtatatgtcatacctcagatgtgaggcagaaaaatgcttttgctcatcatgtctgagtcaagtaagtctaatacctgggactcactagaagtgagacatagtagggtacattctgtttttacaccttggatttttattccttatactttcctatgaagaaagtctgagatacaaattgtgcatactaaaactttttgaggttgtgactaatgtttaatctaaaaaaacataagctcataattagtcagtaacttgattaattgtttagaactaaaatttcatggatttactcaaaggatatctgaaactgatatcaaattcgacagatatgtcatgaataagatgaagtaaacaccccaatatggtccagtctataagaataaaatccatttcagtttctcctgtttgtagatatatacaaggtagacttagagcaatgtataactaaacaagagcttgtattgctcctgctcgcatgtgattctgaaataataatgaacactaacaatttttaataattaacattttttctaaacaaaatattttcataatgaattttgcacataaattcgcttagagtcaatgtgagtgtaaaattctatatcatgtgctaatttttctatagagaaaaatagagtgttacatatcatcgtggcaacttctagtctaccatttttgaatgcagttacatatttagatgattttccaaattgacatatttttactttgctcttataatataataacataattattaatgaaattattcagattaatcctatatattataatataattaacattaaaaccaatgtgtaggtacaacacaaacagtgaacatttacttttcttttaaagatcaaaacttctatgatggtctttcttatgactctttctttgatcattcaaatctgagagatggcctctctgaaatccatctagtttactaatgcatatgacttttctagtaaggacacaaagcactctttatttcctttaaatacccactacaaactatgtatacttaaagtatctgttaaatgaatgtctaaagaaaaaacattcaatttatttaattttaatagtcatttccgaggctcattgtcaacataattacttgttttgacaattgtccatatattctcatatgcagagttgttaaagttcaaatacaagctctttcagtgaggtatattataactgacagaactaaccactgaaataagcgttaacacggacagaataaacatgaatgggcagctaactcagaagctcgttagctgttcttatttgactttgattcttcccctggcgtttgttctctcagtatgctctgagcattcctagtcaatctcaccttcttcttaaagaaaaatgttcatgctgagttctttaacctatgatttgaaatataagatatcagagaaagataatgtttacaaataccttaataagagtttataactagaatattatttctcattacacactcactcaaccgaggatattttggggatacaggctgtggtatttcccacaaaaggtgggatatatatatacatatatatatatatatatatatatatatatatatatatatatatgtgtgtgtgtgtgtgtgtgtgtgtgtgtgtttaaaataaacagactatcagccagcctatatataaaaacaaattaaaatgttgtggaaaatatgaagacttattttaggaatggatatagaaaatgataaatccaatggttcacagacaaactggtctgggaaagggacttagtcttcagaaggacttaggtgaatcatatcatcaattaacaatttaaacaagtgtctacttgcttacactgaaatgaaatatcagggcccagtcaaactaaaagcaacttgaaaacagggaattataggagatcttaataattaaaagaatgaacattagtgttctaaatgttttaaagtcactgtgggaacagagcacagtaacatcataacaataagagttagcttgaaaattatatacaatttgcgattatatatgaagccaaagtaatttaagtataaacgtaagtagttaaaaaaaagagtatgtaggtagctaaacagtatggacggagcttgggaactcttatgaaagagtaagaggaagagttgtgggcccggaggggataggaactccacaggaatcaaaacagagtcaactaatctggacccttgggactcagcgtctgaaccactaaccaaagaacgtactccggtcttacctagatctctccacacatatgtagcagatgtacattttggtttaactttgggtcctgaaaaagtagaatggtggctatcccaaaaaggtattgcccatactcgagatatgttcctcgagcttggctaccttgtctggcatcagtgcgaaaggaagtgcctagcactgcagagatttgaagtgccaaggttgggggatacacaggggactcccacccactcagaaggaggaaaggatttggataggggtggccggaagtaggacagtgagcaagatgtaaaatgaataagtaaaataaaacttaatttaaaaaatgtgtgtagaatggtgaagattaccttgaggtcctcatctacagaggaaaagacagaaacttaggcttagcagagaatcaaatttagcaaaataaagttggtcgcctctccatatgaaagactgtgtgctgaagatgtttctgaaaactatggggaaccttatgtatctgtggtctttaatagtagcacatggataaaagatattattatgtcctttattgtttaagactattatacataacaaattaatatggattggttatagaagtgtattgcaaatatgctcttaaattctatttggttaggaaagatattaggcatcttgattacataaactttaacttttgttaaaatgtataaataaaattcaaagactaaaagagggaaaaagaataaggaagatgatctaaccaaaagttggatgaacatgttaataaaatttatggagaccaactaggaaaaagaggcttaatctcaggagttaagccattaaatatgaaaaagacaaaatatgtgttaattcttacttacatatttgttttggaaaaatatgagattaatgaagcaaaatgtaaataatatcagagtatagaggttgtgctggttgtgatggtggtatacatgtatatgtaacaggaaagtaatcacaataacaagctaggacatatatatggctgccaagtgaatgtagtgttttataccctttacttaatatggaatttaaattattcacttttctgagctccttctatacagttttaaaatatgtgcaatatagtaatataccttaacttttgtagttacaatgaaatttcattgtttgtagaatatttcccagagaaaacaaaaatatgtgatacatactaaccatatgaatgggattaaagaactacaagatgcacaagatgatactaagaagaggaaatagaagatattttaaaatgagaaagattctttcacttgaattataggggcttagggaaatgacttaatgattaaaacagttactgcccaagcataggaactagaatttagattcctggatattcataaataccaggaggttacagcagcccagttgagtttctagcaccttgaaaatagagatgagggagtatgcctatagcaagatggctatgcagactaagcatattagagaactctggatttaattcagagatcctaattcaattagttgaatgggtaacaatcaaagaagactcctgatatttctcattctctctctctctctctctctctctctctctctctctctctctctctctctcatgcacacacacacacacacacacacacacacacaaacaaacacatctcacaacatttgcttaggaggaaaacatccttatagacagtgtcttttgccttgcagaaactttggagtttcattaggtcccatttgtcaattctcgatcttacagcacaagccattgctgttctgttcaggaatttttcccctgtgcccatatcttcaaggcttttccccactttctcctctataagtttcagtgtctctggttttatgtgaagttccttgatccacttagatttgaccttagtacaaggagataagtatggatcgattcgcattcttctacatgataacaaccagttgtgccagcaccaattgttgaaaatgctgtctttcttccactgggatggttggacacgcagactttgtgtgccccggtacaggggaacgccagggccaaaggggggggagtgggtgggnnnnnnnnnnnnnnnnnnnnnnnnnnnnnnnnnnnnnnnnnnnnnnnnnnnnnnnnnnnnnnnnnnnnnnnnnnnnnnnnnnnnnnnnnnnnnnnnnnnnnnnnnnnnnnnnnnnnnnnnnnnnnnnnnnnnnnnnnnnnnnnnnnnnnnnnnnnnnnnnnnnnnnnnnnnnnnnnnnnnnnattatgaatattgtctcctagagtataatattgggacgtaattgaaactctatcatggcagttggctaaaaaggtgattaggctctgtatgagtggaagagcagaaggacaatcaggaaaatgcttatattatattttttgattaaggaaacaagggaaaaaccacacattccttgatagaaacagaaaaaacctttgaaatcacaatacttaaaaagtgaactactctgtgttgtttgtttgtagaggaaaagaagacagtggctataaatgaaaggttgtacctatgtatcaagacatatgtactcatttgtgtgtgcaggagtgagggcaaagatttgatcattctttaaaagaataagccagcagcatagtaaccaaggtgaaagtaaaactaaaggtgtaaatgacagataggggtactatcaaagacaagagaggttaagtcaagaacatagatggaagaactagtccaatgaaaggaaaattagttgctttgacatttgaagaaggaaactgaattcacagtagtgagagtgataagagtctgcatgtgggacagacaggacattgaagtttatgcctctcagcctaaaattagtctgtggaaaatataaaaacaatgttcacttttgaggagaaaatatgtgtatgtcttgatgatatgtcttttctttatgaagagtctgaacagaggaactggagagctatgttaagaatttctattaaagagaatgaatttatgaaattcctagccaaatggagggacctggagggcatcatcctgagtgaggtaacacattcacaaaggaactcacacaatatgtactcactgataagtggatattatccccaaacctaggatacccaagatagaagatacaatttcctaaacacatgaaactcaagaaaaatgaagactgaagtgtggacactatgcccctccttagaagtgggaacaagacacccatggaaggagttacagagacaaagtttggagctgagatgaaaggatggaccatgtagagactgccatatccagggatccaccccataatcagcatccaaacgctgacaccattgcatacactagcaagattttatcgaaaggaccctgatatagctgtctcttgtgagactatgccggggcctagcaaacacagaagtggatgctcacagtcagctaatggatggatcacagggctcccaatggaggagctagagaaagtacccaaggagctaaagggatctgcaaccctataggtggaacaacattatgaactaaccagtaccccggagctcttgactctagctgcatatgtatcaaaagatggcctagtcggccatcacgggaaagagaggcccattggacacgcaaaccttatatgccccagtacaggggaatgccagggccaaaaagggggagtgggtgggtaggggagtgggggtgggtgggtatgggggacttttggtatagcattggaaatgtaaatgagctaaatacctaataaaaaatggaaaaaaaaaaagaatttctctggatggctgagagcatccatcgttgtatttgccaggcactggtaaagcctctcaggagacagctatatcagactcctatcaccaagcacttgttggcatccacaatagtgtctgggtttgttgactgtttatgggatgtctctccaggtggggcagtctctggatgacctttccttcagactctgctccacactttgtctctgtaactccttcccatgggtatttagttcccccttctaagaaggagcaaagtatccacactttggtcttccttcttcttgagcttcatgtggtctgtgaattgtaccttaggtattctgagcttctggactaatatccactcccttggtcctatgaaggctctatgccccagtgcaggggaatgctagggacaggaaatgggagtgggtggttggtaagcaggggaagggggagggaatagggagttttcagaggagcaaccaggaaacggaataacatttgaaatgtaaataaagacaatatctaatttaaaaaaatgtattttaatgggaacactagtttccaggccattgtgcattttatgatttttctgtaggtgggcaatcctttcacggagctccaaactatctcactgatttcagaaaaccatgacatgtccacctaagaagaggatatatagtagtaatttggcaaggcttttgtgaaacagacgaagatttcagttttccaaaatatgcatatagaggttgcagtactaattgaacacataatctgtaactacaattttgtaaaatgattaatacactgctagaactccaaagagtcatgcctagtgacaggcttctctatgtcccttcaagaggatcacactctaagtgacacagggagagcagcatcctcctgagttgagtggcgtgggctgatgttggacttctgtgatttattaaatgtccttctgtgatatttctctgtaacccccattctcttgttctgaagagaggtgtcaatctgattggtgttttatgagcacaggtcataaggtactttccaagttgttgcagtcatccattgagtgttttattgttttcagataccttaggtagccagcaaaaaaaacaacaacaacaacaacaaaaaagcaaaagttttcatcacacacaaaagactccacatacataccttaatagctttaaactattattctcactgcataatgtttaatgtcacataagcaatgcagaacatatgactacctcttatgtaccagctattactcccattaatcatcccagtacccagtgaggtagatgttttggcatagaatactgagtgtaaggatccttctagatttagttaatactccagtatcaattgaattcatatgatgtctgaattgaacaactgtggaatgaggggaatattgaattatttgtcttgtctgtagttttgatggacaaggaaaggctgacttcttttagtattcaaatatcaactttatcatcagtaaatctatatgtataaatgcacataaggtccaaatccatttttcaccagtccagtgttactagtaggctaaaatttgtccctagattggggatcataattatggagtcaatacatctcatggataaagatgtgcctcatcacttccaagaaacaacagtacaaaatcaatgctgcccaaacccctgactatgtgaggagatgacctccagacccacaccttattgaggagctattagcatttgatagatactaaggagagcctctctctgtagccactggtaagttttcattgtctaaatgaccctatatcttatatgggtaaattgtaccaccattttcctaaactaacatcatctccaattttattctaaatatttattgttatagtcatggataagtgtgactcaaaaccctcttcaaaaatgcttccatttgcaaaaggtatagactcctaaggggatccaaaaactaagtaatcctgatcaaaaatcagaaataagtgaccactaagggatgcctaaccaatcgatacatcttcaacacaactcctataactaaggttcaaagaaaagtcacctgagagagagagagagagagagagagagagagagagagagagagagagagaagaaagattacaaactcaaagctctagtacatctatgctacatagtgtcccctctagaaataaaacacaatatatacccatgaaatatcaatattaatgttccttatatataaacagtaaaaaaatagaggaaattctataaggtctttttcataactgagtatctacaggaaggcaatgtcttctgattccatttcctacaagagtaggctcactcataggctgtctgttcatttccaagtgctcatccatggatgcatgtatatacgtacaatgcttgatagattcaattagttgtatatacatagtgtgtgtttgagtatgggtatgattatgagtttttgtagcaataattaaagaatttattaaattatagaaagcaggaacatgaagaaattgagaggaggaatggaaaagagtgacataaaggtgtttatatgtaacgttcttgaaattttttattttctgatgtgggcatcctatttacgttggtctgctccacataaaataaaatcattaaggtggtaaaagcgcccccaaatttttctttttctttttttttttattatttttttcttttttttttttttttactctttttttttttactctttttttttttttactctttttttttccattttttattaggtatttagctcatttacatttccaatgctataccaaaaagggccccatacccacccacccccacttcccctacccacccactccccctttttggccctggcgttcccctgtactggggcatacaaagtttacgtgtccaatgggcctctctttccagtgatggccgattaggccatcttttgttacatatgcagctagagtcaagagctccggggtactggttagttcataatgttgttccacctatagggttgcagatccctttagctccttgggttctttctctagctcctccattgggagccctgtgatccatccattagctgactgtgagcatccacttctgtgtttgctaggccccggcatagtctcacaagagatagctacatctgggtcctttcaataaaatcttgctagggtatgcaatggtgtcagcgtttggatgctgattatggggtggatccctggatatggcagtctctacatggtccatcctttcatctcagctccaaactttgtctctgtaactccttccatgggtgttttgttcccaattctaaggaggggcatagtgtccacacttcagtcttcattcttcttgagtttcatgtgtttagcaaattgtaccttatatcttgggaatcctaggtttggggctaatatccacttatcagtgagtacatattgtgtgagttcctttgtgaatgtgttacctcactcaggatgatgccctccagggccatccatttggctaggaatttcataaattcattctttttaatagctgagtagttctccattgtgtagatgtaccacattttctgtatccattcctctgttgaggggcatctgggttctttccagctatttcctggctattataaataaggctgctatgaacatagtggagcatgtgtccttcttaccagttggggcatcttctggataaatgcccaggagaggtattgctggatcctccggtagtactatgtccaattttctgaggaacctacagactgatttccagagtagttgtacaagcctgcaatcccaccaacaatggaggagtgttcctctttctccacatccacgccagcatctgctgtcacctgaatttttgatcttagccattctgactggtgtgagttggaatctcagggttgttttgatttgcatttccctgatgattaaggatgttgaacattttttcaggtgcttctctgccattcggtattcctcaggtgagaattctttgttcagttctgagccccattttttaatggggttatttggttttctgaagtccaccttcttgagttctttatatatgttggatattagccccctatctgatttaggataggtaaagatcctttcccaatctgtcggtggtctttttgtcttgttgacggtgtcttttgccttgcagaaactttggagtttcattaggtaccatttgtcaattctcgatcttacagcacatgccattgctgttctgttcaggaatttttcccctgtgcccatatcttcaaggcttttccccactttctcctctataagtttcagtgtctctggttttatgtgaagttctttgatccacttagatttgacattagtacaaggagataagtatggatcgattcgcattcttctacatgataacaaccagttgtgccagcaccaattgttgaaaatgctgtctttcttccactggatggttttagctcccttgtcgaagatcaagtgaccataggtgtgtgggttcatttctgggtcttcaattctattccattggtctacttgtctgtctctataccagtaccatgcagtttttatcacaattgctctgtagtacagctttaggtcaggcatggtgattccaccagaggttcttttatccttgagaagactttttgctatcctaggttttttgttattccagatgaatttgcaaattgctccttctaattcgttgaagaattgagttggaattttgatggggattgcattgaatctgtagattgcttttggcaagatagccatttttacaatgttgatcctgccaatccatgagcatgggagatctttccatcttctgagatcttctttaatttctttcttcagagatttgaagtttttatcatacagatctttcacctccttagttagagttacgccaagatattttatactatttgtgactattgagaagggtgttgtttccctaatttctttctcagcctgtttattctttgtatagagaaaggccattgacttgcttgagtttattttatatccagctacttcaccgaagctgcttatcaggtttaggagttctctggtagaatttttagggtcacttatatatactatcatatcatctgcaaaaagtgatattttgacttcctcctttccaatttgtatccccttgatctccttttgttgtcgaattgctctggctaatacttcaagtactatgttgaaaaggtagggagaaagtgggcagccttgtctagtccctgattttagtgggattgcttccagcttctctccatttactttgatgttggctactggtttgctgtagattgcttttatcatgtttaggtatgggccttgaattcctgatctttccaaaacttttatcatgaatgggtgttgaatcttgtcaaatgctttttctgcatctaacgagatgatcatgtggttttttatttgagtttgtttatataatggattacattgatggatttcagtatattaatccatccctgcattcctggaataaaacctacttggtcaggatggatgattgctttaatatgttcttggattcggttagcaagaattttattgaggacttttgcatcgatattcataagagaaattggtctgaagttctctatctttgttgaatctttctgtggtttaggtatcagagtaatagtggcttcataaaatgagttgggtagagtaccttctacttctattttgtgaaatagtttttgcagaactggaattagatcttctttgaaggtctgatagaactctgcactaaacctgtctggtcctgggctttttttggctgggagactattaataactgcttctatttctttaggtgatatggggactgttnnnnnnnnnnnnnnnnnnnngtgatatgggactgtttagatggtcaacttgatcctgactcaactttggtacttggtatctgtccagaaatttgtccatttcgtccaggttttccagttttgttgagtataaccttttgtagaaggatctgatggtgttttggatttcttcaggatctgttgttatgtctcccttttcatttctgattttgttaattaggattttgtccctgtgccctttagtaagtctagctaagggtttatctatcttgttgattttctcaaagaaccaactcctcgtttggttaattctttgaatagttcttcttgtttccacttggttgatttcacccctgagtttgattatttcctgccgtctagtctactcctcttgggtgaatttgcttcctttttttctagagcttttagatgtgttgtcaagctgctagtatgtgctctctcccgtttcttcttggaggcactcagagctatgagtttccctcttagaaacgctttcattgtgtcccaaaggtttgggtacgttgtggcttcattttcattaaaatctaaaaagtctttaatttctttctttattccttccttgaccaaggtatcattgagaagagtgttgttcagtttccacgtgaatgttcgctttccattatttatgttgttattgaagatcagtcttaggccatggtggtctgataggatacatgggacaatttcaatatttttgtatctgttgaggcctgttttgtgaccaattatatggtcaattttggagaaggtcccgtgaggtgctgagaagaaggtatatccttttgttttaggataaaatgttctgtagatatctgttaggtccatttgtttcataacttctgttagtttcactgtgtccctgtttagtttctgtttccacgatctgtcccttgatgaaagtggtgtgttgaagtctcccactattattgtgtgaggtgcaatgtgtgctttgagctttactaaaatgtctttaatgaatgtggctgcccttgcatttggagcgtagatattcagaattgagagttcctcttggaggattttacctttgatgagtatgaagtgtccctccttatcttttttgataactttgggttggaagtcgtttttatccgatattagaatggctactccagcttgtttcttcagtccatttgcttggaaaattgttttccagcctttcactctgaggtagtgtctgtctttttccctgagatgggtttcctgtaagcagcagaatgttgggtcctgtttgtgtagccagtctgttagtctatgtctttttattggggaattgagtccattaatattaagagatattaaggaaaagtaattgttgcttccttttatttttgttgttagagttggcattctgttcttgtggctgtcttctttttggtttgttgagggattactttcttgtttgttctagggcgtgatttccgtccttgtattgcttcccttctgttattatcctttgaagggctggattcgtggaaagatattgtgtgaatttggttttgtcgtggaatactttggtttctccatctatggtaattgagagtttggccgggtatagtagcctgggctggcatttgtgttctcttagtgtctgtataacatctgtccaggctcttctggctttcatagtctctggtgaaaagtctggtgtaattctgataggccttcctttatatgttacttgacctttctcccttactgcttttaatattctatctttatttagtgcatttgttgttctgattattatgtgtcgggaggaatttcttttctggtccagtctatttggagttctgtaggcttcttgtatgatcatgggcatctctttctttatgtttgggaagttttcttcaattattttgttgaagatgtttgctggtcctttgagttgaaaatcttcattctcattcactcctattatgcgtaggtttggtcttctcattgtgtcctggatttcctggatgttttgagttaggatccttttgcattttgtattttctttgactgttgtgtcgatgttctctatggaatcttctgcacctgagattctctcttccatttcttgtattctgttgctgatgctcgcatctatggttccagatctctttcctagggtttctatctccagcgttgcctcgctttgggttttctttactgtgtctacttccctttttagttctagtatggttttgttcatttccattacctgtttggatgtgttttcctgtttttctgtaaggacttctacctgtttggctgtgttttcctgcttttctttaagggcctgtaactctttagcagtgctctcctgtaattctttaagtgacttatgaaagtccttcttgatgtcctctatcatcatcatgaaaaatgcttttaaatctgggtctagattttcggttgtgttggggtgcccaggactaggtggggtgggagtgctgcgttctgatgatggtgagtggtcttgatttctgttagtaggattcttacgtttgcctttcaccatctggtaatctctgaagctagctgttatagttgtctctgttaagagcttgtacttcaggtgactctgttagcctctataagcagacctgggagggtagcactctccttggtttcagtgggtagagtattctctgcaggaaagctctcttcttgcagggaaggtacccagatatctggtgttcgaactggactcctggcagaagttgtgttccactcaccagaggtcttaggatcccgtggggaatcctgtgtgggcccttgcgggtgtcaggcgactctgctggcaaggaagcccggggctcgagtggagtggaaggggcttttgtcccgggtcaggcccgggcagtctgcttccctatgtaccgcagtcacaggttctgcccttaaaaaatttttaagaaagtttaaatctaataaaattaagaggatacattattgaggaacacaatagttgaatgtcgaaatgagtatgtaaattatcatatgtccgtgtatacatttataaaatcctcaaaaatataaaaaagaaccactggcaaatgtcttatatgcttcttatgtgccaacaagtggtgatatatacttctgcctcatacctctaagaaaggcaaagctgtatcaggaggaaaaaaaaaacaggataattctctctaaacatggcacatatatgttctgtaaaaccaaaacaaagcatcaaataaacaagcacaatcaataacaaatcaatccttcaagctgcattcatttaaaacatttaggtttttcctttctgcttccatactgtgagcttgatggatgagtacattgattcattcaggataaagccccaggtagctcacacaccaatatcagtgaaaaagcactgcatccgaagaattcagtgtgctagattcagagtacaaacccccactgctttgtgggcagtgcacagatttagacttcaggagacttgtaaaggctacgttaaaaagccacagttcatcgggctggcattattaggaactgtcacataccagctatgcattaatagtagcctaaactctgaatcctctatgaatatgtgcaggtggtagaatgctctccctttctgtggcatggtctacataagccatagagaaccagttctttactgtacatgaatatgtcttgatagctcaattttttgccagacagtattgcttcaagagtgtggttgtatctgtcactcatgaagactgtgagtggctggctctttctttgaatgccaatagtatgtatagacaaggatttctaaactttcaacataagcatgattattttgcttcagtcaatggtaggttcaacaaaactttgtaattattatacagacactattttatggattaatgagtgaatgaatacgaagaaaagtagaaccagaactagtgttaatttttccctccactgagcccctgtattgcttcccctttgtaatacatgcaaaaaagagaaacaaagtaaggctgtgtttctatagcgaaacctacctctcttgtatacgctgatttctccattctccgatctgaaagacatgatcatttcctttgcaaatatagcacaccgtatcaacagttaacttgacatccataaaataatggctctaattcttgtgcaagacatacatttgtttgtcttcatttcctttgggaaaggataaaaatctctcttttaaaaatgatccccaggtattaaattctaaatcataacaacagctagcattttcaaatgtctgtatgcatggatgctatgataaacacttgacatagattatctcatttaatcctcacagaaaccaaatgaagtgtttaccgtcattatctctatttgatgaagaggatactggggctcaaagagacttaataacttgtccaagatcacctaatgctgaataatcaagaatgagtgccatgaaagaacaaagaccagcctggaccagcatatttttgagaggataagccacagggtagcaggtgagcagatttctctattctaattgaactggacacctaaatatcagaccaatagtggcaaaagaactcagccatgggcttatctcattgagaggatcaccgaccttctgaaaaaaaatcagaggttgaatctgatactttgaagttgcatttctgagaagtaggcaagtgggttgacttatcgtttgtaactagctcctgaaggtgatataagattcatgtcatcttgcgttttcagtggtgtggtgtcagagattgctggtcatgagcttttcttcattcccatgaacatcccagaattcctgacttaaacacttctctctgtagacagtttctacaagctattgatagtgagtttccaaataatttgggtctctggtacatgataactgcatttcacgaaggcaagcctgctgtgtttccaatctcacaaataactttgcctgtcacttaaaaaaaatcagaggtggaactgttctagaagtatttttttcatctaaaacctttagtcacatgctgtttacaagatggacttgttatgaagtggtgtgctcatgtcagaaacatcacaataaatagctttccccctatatacttttgtcttttttttttgtagttgaccatttccaatacttaggtaccattctctcatctttcatcttcatctcccccctgtggtactctgtgatccaatataatgtcaaatgtaacttggttgtggaaattcttagtcaatgtgttgttggccagaagattgatgagtttattctctggactgaaaatgagaagtggggacagggcaagtctagagtgacacaaaagaaatgaattgaaattcagaatttttgatttctctagtgaaaggcagcatctttgggaacttgtggcagatgcactgaaatactgttgctatcttaaactctatttgtaaataccataaatacaatttatttctgtctaaacatctcaatttaaattaatgtattcacaaactttatacatataaaatgtgtctcaacctaatagatttcatttatatttaactattgttaaatctatctttgcaactattgttaaaactatctttgcaagtcaatagatagttatgtgtcatagatgtgatatagtttttactctactgaaggtaataagttacttgtttttacaaggaagctgtgctcaaaaacaggccatgattcttctattgtgaaaattattagattctttgaattttcataagatggcaatatgatttgtatgtttatttatatcatactgtttatgtttgaaatgagataaatataataaggagaaagtgattatcatttgtgctttatctcacaaaattttatggttcttagaacaaaaaaaagcaatccttctagtagttttaattttcagattgtaccttttactgtaagtgttcttagatatgtagacagacacatatgtatgtctggatacagatctggaaacatgatctgttttctaaagaatacactgtgttgtctatgtagccagagagagcagggaagggcaagcagaggcacagacagagggagagggagagggagagggagagggagagggaggcgggacgagggagtgagataatttgtgaaaagcagagagattccttttttatagatttatgttgcaggcaatatttcaacctaagagcatggacacttatttgctacttggatgcccttgaaaaattacttcatctcctgcattgtttccattgttgtcagaaggaccgcaataacagcactgacctcaaaatttattatcaaaatcagtaaagctgtgcatatgaagaatgaagaattgtgtctagcataaagaaagcactcagcaaacatcttcacagttgttttttatttcataatgcataaagtttcccattactcaggaaaagtatgccagtcagaaatggtatcaaccttgatttgggtttcaatatttgttgattgtaaagtaagcctttacaactctctagttgtctcttaatggatatcaaggttgaatcagactatgtgtttagagccccccgtggtgccttttctgtgttattgaaactggattgcagagcactctctccagtctaccatggtaagtccacaatttctaaatgcattctgattcttgagtgaagcttctttaaaactcaaacaagctcatgcttggcaagaggagcagatatgagagcatcatcgaactgcacctccgagacccgagctggagaagaattaagtaaacaattcctttcactctcataaacaaactaacaaaaaatccttacttttaaatgggaggcagaaggttaacccaatgtgtgtaatattttttttcctattgaaaaaaaaaaaaagagagagagagagagagaataccttggcaaataagtagaaatatttttaggctgtgggaagttcaacagccttaagcactgttatgtagaagcacctatacacatctcactgcatttcaagaaggttcagccattgatgaagtgttacttgaaagccacctttctattttggcttctgctaacttcctctggtgtgctttcttccctgctggcccttttccatttgactttcttcctgatgccccattgtttgacttgctttagataatgtgaaaatactgactgcagatgccaagcatgagagggctcttcttcctcactgaactgcatgtagcaattcgcttttctcacttccagggtgactttgcaatcttttggtaaatacttcatatatgtacattgtggtcatatagatgtgaaaatgaacaattctgcttaataacttaatcatctcactccagtttcagagaaaaacaaaaccaaattgcagaaccaaattattaactatgcttttaagttttgagatggtttttaactctaataaaatggtgaaaataacagtggatttattgttgctactttaaacctttaaaatccaatgtctttcaagtaaaaaattgaatgcttgtccttttaagagagaaaatgtaaacttagtttaggtagcccatttatatatcacatggaagttaataaatctcaaattaaaacctgtacattaaatcagaccatttccagatatccctaaaccatgttatgcatagggtgcgtttaggaatgctaaaatcccaggtcctttttgtgttcagcacacaccctggtaagctaagaagaactagcaccctaaagtgcaccccctttcttcttgtgtacggatggctaagcaacaggaagcttattgcttttagtggattcttgtttgtttgtttgtttgtttgttgacagggtttctctctgtagccctggctgtccttgaactcactttgtagaacaggcttgcctcaaactcagaaatccgcctgcctctgcctcccaagtgctgggattaaaggtgtgtgccaccactgcccggtggcttttagtggattcttaaataaagtagacgttaaaagtgtatttttcttcaggggatgctttaaatacttcctggctttgcttcataatactcaagttgggtaataactgaactagattttgttttctgcccttgtagtagccatgccatttagggaagagaatcgccccaatatctaagaatacattgcatgttttctgtgtagaactatggaagaacagagaagggcaagcccatgtttacatgaaaagagacacagagtgaggctaaatatcactaaaagaaagacttagttagctaaattttgcatggtaagtggatttttactgggaatataatatattttaatatcaaattcctactacactgtattcccagttacctactaccttacccaaagcatgaagcaaaatgcaattgctttgctttctcctcttttttgtcatcaagatgattctcagccttaggaagaaacaacaaagaaaactcttgtgcttgtgtatatggtgtatttgtttggttctagtcttagatctcagtcttaaatgcattccactcactcaatggaccacaatgctttttaacacttgattgtatgttctcaagataatattattaagtaacattgcttgctgtttggacaaacttaagtaggaaacataaatatttcttttgttattagaccttggacaagttgattaaacttcactattgtttatttttttcttattttaaatggaaatagacaagatttttattttaatgttttatattataacataaatacatcatttcccatttcccttcccccaaatcttcccatatacctcattttgctctaatatatgggtgctttcattaattgttgatgtatatcatattattatgatatgaacactatatgatatatatatatatatatatacatatatcacaaacaaaaacaaaacaaaacataatgaaaataaataagtgaaaacactagaaaatcagtattaactactcatttacatgtcaaagaggtaaaatgacattgagataaacaatgttgagatgagcaaatatatcatccaaatgaccaaaaagaggagacagtagagcagataaacttgttatgtgcattggataagttagtagggaactatgaataatattgtaatagagaagtaactggaaattaatattcaatataatatactcctgctaaaatccatttatcattacatatatgggtgcatatatttcaaatagtcatatttataaatacatatgcaaacttttatgtttcaaaatataaaggcaataaggttatattaaattatgctttagaaattagataaatatttattgatccacatattttgaacatcgggctaaggtaacttctaaaccctgatatgataaccaggtgttctaaatgtgttaatttaccatctttagcaactataataagaattaagcaataactgcagagtgaaatgaggatcttatgttacattcatcatgtgaatcaaatctcatttacttgatcatataacttactttatgatagttgctaattctctatgctcagaaagtatgctttcagtgtagaaatgttgtagtactaaggagaccaaagtctatattttattccaaacttattttattctgcccctgtcagtctgtaggaactttagtcagattaacataaaaaaagcataagaatgtgtgttctttcttcttttaataaatgagtcacctaaataaaagtgctgagtagacagaatccatattcaagtaatcattgcatttcagaaacagcctgggtcccattacttactgaaggagaagggatactgtgcgaagtataaacttctctcacaatgctctgtgtgtcttactttctgcattatattgatgtggggtattgccttgaaggacttggatttatttttgaactcctgtcagcgctccataattaacattgcccagaagagaaatgctattttgcctcctgcatcatcaacataactgtcagcgaataagaaagtcctctttgccattacagctcttaatgtaggaagcagaatagagcagctggatggctccacactgggctgttaggaggactggcatttggtacgatacattgtagacccacccacatatttttgctttaaaaatgagtcttgaaatgacattttaatcccaatatttttccaattttctaatatgatatatctgctgatctcagcattgtttatctcagtgtcattctacctccttgacatgaaaatgcaaagtcaatgatgattttctaggttttttttcacttatctacattcactatggcttttgttcatgttgttgtttttgtttttggtgatctatattccaaaaaataattcatggttttctatcctgtaattttgctgaaatttataacaacaataggtaattaaactttccatgaaatgaaagatagtaatagctcagtcttactttactacatgagaggcatctaagcacagatctttaatagtcaaaaatttgtgcagcctctacatttgcagtatgctcaaaagtagcattaaataatgtaaggtaattttcttatataaggtggtgcttatataagaagttttaagtgcatgcatagtagtatattgaaatgatataggcacttcaaaatcattttgacatgtattaaaagttagaaccattcatttccaatacagccgagagattttactattatgtttctcctccaaactaaaaacacagatccatacaacagtgtttataagaatatttacagaaatattattcccagtatcccagagctgaaaataactcaaatgtcagcttattaattgataaacaaaatgttaaatatttatacaactgaaatcacttataaatttgaaaatataatgaaatactgatgtatgttgtaacagaaataaactattaaaacaattatgctgagtgaacatagacagaaaatgtcacatagtttaaaaacattataatgaaatcaaatcaatattgtattaaatgccaaaaataagcaaatgcatagaaagcaaaagtgaactcatgccaggtatcttctacagaactaagctaactcgtctcacaagacagtttcagagggtgagtctgagcctggatacctgagttcaactcctgggacccacatggtgtaaagaaagaaccagatcctgcaagttgtctctgacttctggatgcattcggtggtgaagaggcatcatcgtctgtccttacaaataaataaggaaatatgatttaaaaaataaaaatctaagaaaactacccataagcctgacacaaaaggaacaagacacacgggatgctgaggctgactttgttttttgaatattgctctaaaacactagcttcactactaacaaagaagtgaattcagttattgaggcaagggagatagaaatgataaaatgttcaaaaacacaattattcatgatcattttgcaagcatgtggtgatattaaaaacttctaaattatgctttttgatcaatggtatttttataggtaaattatatttaaatataactattacagagatttatgatatattagacttactcgtgaataacaatagagagtgagaacaaagtaaatgtagaaggaaattatgaataaaattcaatttagactttagattttatacatacctgatcaatatttatactgtgataacttcagagtatcttgtaataagtaaaacatgctgcttttatatttcttaagcacaggtggatacttactcttcacagttcaaagattgattgttaagtgttgttaataagaaaaaagaagtagtacttttggtcattgatacatacttggtccatcctttgagactcgctaaggaattacataaagatgaggaagcaaaaaatattttcttaggcaaacggatggatatagagggtatcatcctgagtgaggcaacccaatcacaaaagaactcacatgatatgcactcactgataagtggatattagcccagaaacttagaatacccaagatacaatttgcaaaacacatgcaactcaagaagaaggaagaccaaagtatggatacttcgtccctccttagaatggggaacaaaatacccatggaaggagttgtagagacaaagtttggagctaagatgaaaggatgaaccatcaagagactgccccaaccagggatccatcccataatcagccaccaaacacagacacaattgcatatgccagcatgattttgctgaaaggaccctgatatagctgtctcttgtgagactaggtcagtgcctggcaaatacagaagtggatgctcacagtcatctatgggatggaacacaggacccccaacggatgagttagagaaagtacccaaggagctgaaagggtctgcaatcctataggtagaacaacaatatgaactaaacagtacccccagagctcatgtctcttgctgcatatgttgcagaagatggcctggtaggccatcattgggaagagaggccccttggtattgcaaactttatatgcctcagtacaggggaacatcagggccaagaagtgagagtgggtgggtaggggagcagggagggtatgggggactttcaggatagcatttgaaatgttaatgaagaaaatatctaataaaaatttgaaaaaaaataaaagaaatactagagatgctgtttctctacatcatgatccagagtaagaatagaccacaggcaagaaaaaaaaagaaaagaaaagaaaagaaaaggaaaggaaaggaaaggaaaggaaaggaaaggaaaggaaaggaaaggaaaggaaaggaaaggaaaagaaaagaaaagaaaagaaaagaaaagaaaagaaaagaaaagaaaagaaaagaaaagaaaagaaaagaaaagtagagagtagaggaggtgagggaggggaggggagggaagggaagggaagggacagaagaaaaagaaaagggcaagcagtgtcaggtaatgcacacctattgtcccaacactagggaagcacaggaaggcagagggaggcagatctctgagttccaggccagcctggtctacagagtgagttccaggacagcctggtctacagagtgagttccaggccagcctggtctacagagtgagttccaggacagccannnnnnnnnnnnnnnnnnnnnnnnnnnggagggagggcaagtaaaggaggaagagagactgaggagggagggaggcaggtagagagggagggagggagggagagagagagagagagagagagagagagagtccagtgtttaaagatgtctttcctgtttttcatatccagggtaaagtgtgcatgcctaaattattttctcactgaaaacatatttcagtgttttatctacccatgtgtaacaggtagatctttcaaggaactttaggccatcaattctgatgctgaacatgtagaataaggaaagaagcttgtctgaaagcatcaagagtcttttcctaatggaagatttagtacacttaagaacgttttaatgagttcaaatcagattcacggcagactgcacaaatgagaataacaaacagaggtcaaaatgtgctttctgcattctttgttgcatctgctagatctttggggaaaggacttaatgtacgttgatatgtgattgtttcagttttcagagaatgtaattcagtctatgtccggtttcattaagactgctacaggatcgctggagtaattcgaagagaagagagatgtgaagggtagtgagcgtgctcactgacgtgcatgtttatcttgcagtttactcttagaccatgcataaatctattatccgatgtctattacaatttaatgtttggtatctttgagtaactctcctactcaagtattgtaatcactttagatttgggatcctgaaccatttgttgcctgtgacacatctaagatatgttaacaaagactgaagtagtagacgccgatgtatggctccctgatctgtttctacatgatagatgcttagactaaattgaaatgagttgactaacaccttctctgtccatttgtgtttcatcagcctatagctatttataaaagaaagaggcttttaggagagagggtctcaaatgaaaactaacgtctcgtctctctctccttgcataatttatataaactaaaaaatctttggactttgttaccaagtcattttatgaatcaattatttcacactccataataaacctattatgaatttttatgctatgtctataataaaatacaaaaaccgaggtttagattttaatacaatttgaattatcagtaaccaaagcaagaggaaacttaaaaaaagaaagtcagaaatctttcatgaagttttatattattctaatacaattcctaaagtttgaaaataagaacagctttagttatgcagaaaaataactttatttattgtcatttcatagaggaggaaactaaaggaccgaggttataaacctagctcttcatagggcaaggtagtagacttcaatacttcagttataaagcatatccctgagccgagacatgtcaggtgttggggaggtatccatctttgttgtgatggaacatgcgtcatctcttcctcaagctctcactctatttcctagtgcaggtgtcttacttatattttacttattcatgttcattttcaaagaggttatagagaattggacatgctcaatatcgaaaaacatttgtggaaaatgagactatgcatttcttgtagtcagagaagaataacgtttaatctgtccacctgaccttcctgagatacactccttattctcacataaagccaagtgaacagaaggataagtattagttgatttgagagtagtaactggatattatagaccgtgtagatccattacaatgtgatagaaggaccaccaaacccttcttaacttccactatgacttcatgagaactttatatgttatctattaggatatctttgacatagagctgtgtcctatacctcaacaatatataaatgagaaacagtaagatttctatttctttctcatctatattttttatttgctctgttcttagcctagtttgccaaagagtagaagagaaaacacttgtgccttcaggtttatatacatttatatgttagacatattcaccagcctattgctgacaattgataatgtgttttcttcttgaacttccatagcaaaatgccactgactgtgtggtttaggcaacagaatttaaaatatatatatattctcacatttcaggagttctgatattctagagaagggtaggaacatgattaagaggggcatgagagacagagagggacttatgtcttcttttttcttacacaatataattttctatgactaaaacatactaggtgtcctttttcattttctttttatatttaattttaccttctgtgaatccagtgtccaagttgagtcatgttcgagtttaaaagttcaacgcatacatttcaaggacacagttctgcccgtgatagtttaagagttgccaagattcgtgccttgtaacacatgataagcacttgctccactgaagcagatgttaaaagtggtaacttcatttcagaatcaacccaagagtcaatctcagctgtagcagtgagaggtgaagagggaaaggatgtgttttgagaaaaactttatccccagctgtgagcttgtaaaaccagaagctttcatgcaaggtttggagaagtataatttagataatcacattctaaaggagaggaatcagaaaatatcaagggaaaatattcccaagaaagttcaaaatccatcaaggcaatttcaattgattttaaagattgaaagtaaacagctctgcctggctgctgggtacttcaggcttattaagatgggagcattgtcttttagcttagacttcctcatctctcagaaaaggtcctaattgttcagctctacagggtgcccaggctcacaatcctgtgcccagcctgtgagttgctggccaattgttccctaacttgctaacaacctgggggtggcctctttctttgaatcttagaagggagcaatattgccctgtaggaagagtaactgctagaatggcctccaaattgtctggtcagtcaggatttttttctaaagactattcaaagtcttggtaagaaagcattgttccactccctagttcctgaatttggacagcaggccttcattctgccctattgtttgtctcccacttagttccagctggcactatctgctagaacaatttcatttctatttttgactgtagttaaaaatggctagtaaaccctcttcatactctctttcagaaaggaattatgggtagcagagtcgcacctttgatgttcaatccagaaaatggttttagtgttttgttttggtttttgttttgttttgctttccctatgggctatggcagagcatttttcaaatcttcagagtattttttgttgttgttgttgttgttgtgattatttcacctgacaattcctttgatgtctttcacacccatcatattttgcaaaaagtactgataaaaaaaaaaagctgactgtgccttcaacactattattatattctttcaaaatgaaggtatacaattgtacaaaggtatgtcttacacaggtcttttgcaatgtactagataataatttcatcatattcttgcatcatattcatcacttacttgttaacctgtaatgactcaatcctcattcttctctgagatgtcatagacatgtctctcttgtttctgaaacagaatccagtgtatactcagctggcctcaaattatacagcacaggctgacactgaactcctaaacctcctgcctctgtctcctaagtactagatttacgtggctacactattaggcccagaatatacagtgctagaaaaagaacccaagtttacagatcctaacccagtgttccatcaaatgagctctacacacagtctgagactccacttcaatggtgtcatttctcccaacattatgtttacaataataggtgcattttgaaagacgactcagctgtgttttccaagctcccctcttctccaggactcagatcacttctagttaaatgagaataataatagtctctgcttcatagcgctttcatgattgttagattggctagcacataagaaacagtagtgctcaatccacaggtacacacacaaagaagataaggattgggggcttgaagtttccctgccaaatctactgtaaaaggtggtaagcagtggggatggaagcctgtcttgatctgcactagtgtggatttgaatcctggccattatttagaagatatataagtttaaggaacaaggattgacagctttgttaattcatagataaagttaggaaaatacaatatctccttttttttacacagaataacgtttgagtgatgtcaacatttactgtcaacatcatctctcaccgtgaacactttcgcagcttcccaattgttctcaatgttgccagtcttatctgtacaataactcattttccacacaattttccaagtaaagtatacattgaagtaggagacttccctgtgtaatatgttcattgacattctaccatgtcaaaaataagtgccaatcctaaaagggtggtctatttgttcctatacagactctgaatagcccaatctcccatcttatcaaaagtcacccttcctttgtttgctctgctccaatcatgagtgaattctgagcatactgaactgtttcttttctttttgttttttgtttttgtttttgtttatgcttttgaaactttgagcttgatcaggtcctttgtatatgtttacacacaatactcatttccataaaacccaggaagagttatttctcctagcgtgcctctcctcaaggacatccagaaatatcattttccatcatctcatctaaagtggacaactctccaggctaatctacattctctcacacctttcacatgacttttcaaactttacagacatcatgtttatcgggatctttacttatacattgtttctcttgtctgacacttaaaggtgtaagtatttcctgaattgttcatattatctttcacagtatgtaacacacagtaggtgttcagtgacataatatgaagaaacgaataaggcaagagagagatcctcttacaacataaaaggtttttagtatactttttgcaccactaagagaaattaagccagaagatggaggtctgtgtagacatgtttcactgacatgtggagaatgccattcactgtggaatctggattccatgaggaaagaaaagaatcactgtcaagtcttctgaagccaggagtctgagaactgccaccattcagaagaggaagtgtgtgtcttttcaggtcttgcttctgacagtcaactcttggattgttaggtgggtctgtgcatggctgctggaagctgcttagttaaggattctggtatcaaatactttctgccatagtcactctgtctccctggggttaagtgttgaaaacacgagattgtaacaagtctaaaccaacacttgttttggcaagctggttaaccaggctggcatttaccaggaacacctctaccttgcatcatgtcttttttccttcaaaaatagaatagataggaggataatcgtagttcctggtcatctgcatcacagcctatctatttctagaaggcctggagaatactttcttccaaaatctgttctcagcggcagccattgtcttactgaaattgctttttctgcctccaccagctggacactcaaaaacatgatatgacgaagtcctatttaattttgtcatcctatcatctcaacgaacgaggaatgtgaagcctcatcctgatataacaattgtgcgtggcagattcacatccagagtgggaatggcatgcctggcaaatgccttcttcctgtcagtgatttcttcacatgacatcctcccacaggttgtcttgaagggcaagcattaccaactgggaatattgtgtacacagatatgtcatcggctatattggcactagccctttgatggctaactttattacaggtatcattgtaataaatattagccaacataaacattggtaccttgaatgcttaatgcagtggatggggaagctgaaacaatagaggttaaatttggcatataaatttacccaatcatgtcacaaggcaacctggcatattatgttgtatagtgatagcatccgcttgatcagtagtcatccctttatgtgcattggctttctttgtctggcctgttgaatatagaactatttgcatttatcaaagtaaagacttccactttaatttttaatgctacttatctaaagccaataccttcaaaggggctttttgtgcatctctcagcaagattccagggttgtaattataattctgcatctaactttgccggtgttggaatgttatgaccaaagcaactgccttccacttagttcctaaagtgagattttcaaaaactataggatgtatgttctatatcatggtagaatttttggtaatgggtcatcaaaacgatgccatatttaggatgaaaggtaagggccatggaccccttattttcattatccacatttctatgtaaattccatcttcatggaaaataaagcaaaaggaatagtgaaccactgagaatgaagtgagtttaaggggtctttgaagcaatagatcctccatgatggctacagcccaggaaatcaaaaagaagagcacaattgcaatgcactgccctctactgatcaggcattacacaaatgcagctcctatatcttatcaaccctgtgttagttgaatttttgcacatatacgcgtttcctagacaatcactttaatattaagtagatctctcttttatagcttcttttcttttttattagatattttcttcatttacatttcaaatactatcctgaaagtcccctataccctccccccaccctgctccccaaccaacccactcctgcttcctggccctggcattcccctgtactagggcatataatcttcgcaagaccaagggcctctcctcccattaatggccgactaggccatcttctgctacatgtgcatctagagaaatgagctctgggggtactggttagttcatattgtttttcctcctatagggttgcagaacccttcagctcctcaggtactttctctagctcctccattggtggccctgtgttccatccaatagatgactgtgagcattcacttctgtatttgccaggcactggcatagcctcactattgcatggaatttccacttcatctttctccagcttcagagacattcctgtaaagattaccaccatggctgaaagcacgttcccatagctttaggattcccagttatatgattaacaactcacagaatgtcacttgccttaatcataaaatggcaattttagaagctcattttcaaaacttggtagaaggaagaatggaattaattatacagagagtgcaaatttctctaaggtgcataggtaaacttgggggagggcaactgaattctttttctaattaattgatgaagtagaactagtgttataggaatggaaatttagagttggaaagtcaaaacatttctgcaattcttttaatttttttttatagacagaaaaggttaatccaatatctgcataatcatttttgacatcacttcatttttaaacacaggattttaaatctctccatccattcaccaacttatatatgatgactacatgattattaaggagacagagagtatttaaataatctatactcagtaaaaagttaatgtgtcaagtaggacaagaactatttccaaggaagggaataagaatgtgttgctgaaaaacttgtctggaaaggctcctaccaggctgaatataaaaacttgattgtttttctcagggtgtgtggacttatacatatacatatatatgcatgtgcttatgtgtgtgtttgattattttggggtacagagaaaaacctaagcaatagtgaaaaaagaaaacccacgtaatacataaaagctaaagaaatcagcgttttttttaaataaacacttctgaataattaacttttttgtgaaattttgccagtgccaaaatctttcagagtaatataatctcctgagatggtttatcgcacttattaaagatgcaaaattattatttagaagaggaagggaagggcttcagatctttgaatttgtaaataggctgatgttagatgagggtggagaacattcttcatagattccgaggaagaaacaatttacacatgagggctgtggaaacgaggttgggtagcatcttcaaaactatggagttagcactttcctgtaaggagcttttgtgtgtaattgattttccctgtgaaattaatgaactcctttccaaaaacgcaattggaatcaccgaggatgaacttggagactcaataacgccagcaggacttgaagggttaattcttcagtcaccactaggtgtcaggttgggactggttttgggaacttgcaggctctgactggctttaagtgagaacagacaacctctctgttcctttctgccaccgtgctgcttccttaaatagagacttttacactgcatatgtcaaatctttggaacctttcttttttgtctcatgggtgtttacagcatttaaacttttcaccccagcatgagcctcacaggaagggagttttgaagaggagaaatacaatttaaagggggtcagcatttgtgggcagattctttttgtcagtatcccccagaaccttcttcattctctgtcacgaaacacttagagtttacatgcaagttgacaactaggtttgcttaggccctgtaaccttcagtagagataaaaagcaccgaaagcaaggaggtgcagactcactatgtaattttgagcatgtagtaaaggtttgattcattcatctttacatctttaaaatgagtatatcacttgagtaagaaagaatacataaattttataaaatctccctagaaactgtaaattaagaagtaactttatagttaaggtcttgattctgagacagagtaaaccataagcttggtgcccttgtttgcatagaggaaataccactaatgcaaaactgcagtgcttggatctcttgtagaatgtcactggaacaattccttataggaaggttagcatggctggggtattataggcaaaggatggagctgtgtaggaagagaagatgtaaaattaaagaatttgaccattatgttaaataatctgacggaattactctagcacaggcagcaatcaaaattgtatacagaagaaatatccaaaaggttcacaataaaatctaagctaattaatatagcctacacggtcttatccatctttgcatcttcatatcaacttttgctccatttaattgccttgtaaatctgtaatctagaagtggaattattttatgaccaaaactactcgtcactgagagcctttctcagcccattttgatcatgttagcacagctcagctctctctgtggtgagtacaatcaccagctcttcattaagtcagttcaataccatgcattgatatataatacagttctaggcaaagagacacgaggaaggctaacgctttatggtccaagtttaagaaagaaacatttaaatatacagataattcctgatttgaggtattatgccatatgtgccaggacagcacacccacgatctgatggttagcaaaaatgttgtgtaaagctgagcatgtggagtctatggaaataccagaggcttttgaagatgaaattgaactactgaacaaatccaagagcaactatcttttctcccactgcttgtaagaaatcactcagttttagaatacatggtaaataaagtagtcatcttttatattactgtaaaaatcaataatatagagagtatggagagagagctcagagaataagagcatatattgcttttcagaggatctggattcttgtcctagaaccaggcatctcacaaccacttacaactatggatcagagggcatctgacacctgtgacatgtgtgggcctcaccacacacatattcatatgtataaattaacacccacacatacataattaaaagtatgttttaaaataatatagcattacatgattagagccatgaaaggacataaaacccacgctcatgcaacaattattgagcatgatgagttattaatggtaaattcttcattacacatgcccactagctttttttttttttttttttttttttttttttaaggaaaagaaagagtgactggagatgaaatcactaaaacagttaaaaccaagttttagagtctttttttcttcagtcttttcaattttccagtgaatgtagaatatccaagagaccggctttccctttataatcctgtaacatctgagctccgtaatgatctctgcattatttcggagtcttcctgtatattaataaaagcttgctcaccactaatactcacgcagctcgtgtatttagtgaaatgcccccgcggaaattctcttttcccaagaccactggtgggtgctgcttttgcatcccaggcttctcactcacaccttctctttgccacttgctttttctaagtgttatcgtacacagggaacctaggtgttatgcttcctttttatagacttgaatttgttcttagcttctcaaacctgcatgtcaccacctccttgaaataactgctctttagatccaactctagtttattgacattttttcctaagtactgaaaagtcttgtttttaataacagaaatgatagatatttaaatactttctgacttctcacttcctgaaaagatgatattataccagaattattctttcaggcttagtacctgcaatgcttattcataaaaatcataggttgtaacacactattgtttaaataaagttataaacaatttatacatgtaaaacttgcaaatatttgatggttaaggtcaaacaatagctaagaaataagacataaaataatataactttattgtttcaaaattctgtggaattgttccttcccaaaattatctgttattatttaaatgttgggatccaagagcatatcatcaaattatgatggtctttaaaataaggagtacattaaatgccatatatctgttttatacccataaagtttctactccagtctcagtgagatatgttagtgtttggtattgagttcaagatgaaggtgatggtagcgagttgtgatagagtgggtagatttttactgccactgatatcagtttatggatgctaaacacttcctggtcaatcggcacttagatgagatgtttatttgcattgattgtcgattatttgcttacccactaacctgcaatgtttatgttgttattttcctctatacatgataatacacctctaaaacctcctgagtgttcctgttaaaaaacatgtgtgtcatcgtctgtcttgaggggcagtgccttgaaagatactaagcaaacaacggacagctgggtggcatccagcacttcctaggtgtatgagtcagaaggaatatctgtttatgatgcaaaggcatcctatgggaatcaaaagaaagcgatccctatctcagttttggttttgctggaaaagagtttagggaggcttttccggtctccttcaaacaggtgctgttcagtgctcagctacttgctgaaaaataatttcacacctgcaaattctctcaagaacgaagcgcaatgacatagaggacaggcaggtagattttcctttcttgttatttcctgacagttatttatttatttagcacagcaccagtcagattgcagagcccaataaaatgataaggctgccctcccgaatgtcaggataggtatcaagatccactcctttaggggccttttagaaatagaaagatccgaatctgagctttatctgctaaaaagcttattttctaaaatagtgttgtcttatgttgtgcccatgaaggacgcttctgtgtgtagacatcccaggcttatttcactgtcagacaacagcaaaaggctttactttatttactacaacactaggacttgatgaaggtgcagtatcaacttcctgttccagaaaaccggaactgttatatacgacttttcttgcttttgaccaagagtccacttcttatagtttagtccagtaaatcacagagggaatttcaagttgaaagcaaaattgcacatcaaaagtttcaaagataagtatgatattacacaaagaatgaaaaccttcatcagacatttagttttctgtctacaataatatatgatttgatgtcttggtggagcctggtattgatggcctttatctccaaacctgataaatatgggttataagtgaaaaggaaaccttgcagaatcaccaaaatattgtgggcatgtgtgtgtgtgtgtgtgtgtatccaccaatctatatacctgcccatttaaccaactatccatctttgttttagcgtatacattcattcatctttctatcagactgtccaaagtgagacctacaggcagatgatgggccatgacagagatggatagtcaggccattgattcagagatgttagtccttgccctttcattccacatctatatccaaaaatttagcatcgtgagcaatttctattacttaagctttgagtcaagtgttcaccaacacacagcttgtgttgttgaatattttcaggaatggaatttgaatctcctatatttcatgtgcagcatatctttagtgatctctacttcatcgtttgcacctgtcatatgcttttatgacatgtgccttggagacttgagagaaagctcagtagtaaaggttgacttaatgggtaagccttaaggcctgaggtgatctccagagtctatgtataggtagaagagacaatgttacagagttgttctctaacctcttcacaaatgctgtggtacatgcacaacttccatgtcttctctacgctcccttcctccaccccccctctctctctctctctttctctctctctctctctctctctctctctctctctctctctctctctctctcacacacacacacacacacaaacacattaataatgcataaaatacttttaattatgtgagccttttatcctaaattgcgaataatctgagatatttattgaagctttgagaaaagtgctgttttcacacttttatatgctgcttgcttactcagttatcacacgcagacccttctctactccacttaaaggaagcatcatgctgacggtatcgtgtagttattcagagcttgctttgtgaaatatcaaagaggtgtgcagcctattattcagttcatacctcaatatcagttctttttcatgtgatttatttattttgcctgcttgccctcaaacacatactcctaaaaagtttatgaaaagcaaacgcagaataaaatttacctatattaatgctgggagtttcttggtgtattatctgtctctaaaatgtaccatgtttgaaagccaaggagaaaaatgacactttgcacaatgggaatgattctgtataatcaactgactttatctaggtacaataattaatagtgtcttttatttgtggcagaattatggttagccggtgtgttatattttctgttgttggaatttgaaaaaggaagagtccggtcctgaggaacctcattttaataatatttaccatggtgaacaatttacaaaaggcatttgcccacaatctgatttgttttgttaatcaaaaaagaagaagcctgtcatggtaataataactggagagataaaactgggctaggggtgtggggagagaatgtattgagggcactgtaggggtgtgcagaagagcaaaatagaaactttatctgaagcacatatttatccactccacaataagacaaataaaataaatgtgaaactaaatgaagctttcatttggtgtgtatgtgctttaatgaagtttatccctttgttactctctgcaagaacagagtctagatacagtttccctagttaactctatagtcaagtgattcctctccataactactataatcaatacattccactgcaaaaaaaaagaatagagcatatttatattatctattagcacatagcagtgtgactgtacacagtatgttgaaacaatatacattagggtagcacagtttctgcataggcatctaataggatttcataatcttgctcagttcaagaactaacaggactgcaattaatctcttgtttaaagcctagtttgcctatcaggcttgattgggaagaatgctaatgtaggtttttttttttggtcaattttgataggcttttggaccaagtgtcttggtttcttcctagctgtaggttttaagagagctctctgttcccaaacataagaacttttcaacacagccatatgtttcttctaatcagcttcttcaaacaggagggagtctaacaagattggcattccaatcccacatgcgtggcttataatatagaaatcttactctgtatttgtgttggttagtttcctgtcacttgatacaagctagagtcatcagcgaggagggagtctcaaaggacagaaaatgtctccataggataggatccttggtaaacctgtaggaaagtttcttatttgataacttatggaggagggccaatccattgcgggtggtgtcattcctgggctggtgcttctgatttctatagaaagcaattgggcaaggtttggaagcaagccagtaaacagcactctttcaggtcctctgtgtcagctcctgcctccaggttcctgccttgttttagttcctgcactgagttcccttgctgataaactgttatgtgaaagtgtaagcagcacaatttgctttggccatggtgtttcatcgcagaaataataacccttactaagcttgcattcattcttgagaagacacaaaggtttggggctagggtaccaagaaaggaagctcatgggttttatatctattttagaaaaatataactgttcccttaatcttgtgaggtgaactaattagccatatgtaattcaatgtgtctccaaaaacaagaggactagaatttagaaactcaagaagataatttgaaaatcttcttaaaatttctttggtcatttcctagaaatatgtttaactcattcatatgacaaatgtgaacttatgtagtagaatatatatgtatggatacataaaaaacttatatgtgccagacactattacaatgctgttaatgagttcataaataaaattgattttttgctttcctgaacccttcataagcatgaggagacaatagtgaatggataacaaaatgtagtatgctaattcagtagatgttccatgtctaaaaataagtttatatacattgctggagaatttggagcatgtggtgtttcagataaatactcatggaagaattcttgaatatgcagatattgaagcagaaagttaaatgaactgtgtgaaatggaggtgtaaatatgtggtctcaagaagaggaataacccagtgagtcttgtattcattgtaaacagaatgatagaaagtcagtacttccctgtcactctggatgagatgtcattgtctttctttcttttcttttcttttcttttcttttcttttcttttcttttcttttctttttttttttttttttttttggtttttggtttttgatttttcgagacagaatttctctgtgtagccctggctgtcctggaactcactctgtagaccaggctagcctcgaactcagatatccacctacctctgcctcccgagtgctgggattaaaggcgtgcaccaccacgcccggcctaagagatgtaattttcaatgcaggcagcaaggaagttccatatcagcttagaatccttgcagtactgagttttgtaccagacactgattagtcattgaaacagcagaatctatttcaaagatatgttatgctttaacaagtaaagtggacataaatggagtttccctgcttcctgtagaaagtgatgttatctaggactcatctattattcatccctgagtttcccagctctctagttgcagattgtccttaaggttaagactatagatcaacatttataaaccttctgatagagtctctctgggatcacctttacttggcatgacctaataactttgcaaagagctctttctatgtctgcctcattcacattctaacagagacactacaaagcttggatggtgtgctaggagttaatgttgcttttgttattccctgtcattcatgaatgtctaacaggctgaagggcaaatggatttagttaaatttgatgtggggaataaaagaacacctttagatagacattaagaattattctataatacattaaatatttagctagtgaaggaatcaagataatttttcatgacataagataagagtggccatacctgtttcctctaactccatgaagataacattaaactaaatgcaaataaaaatattttaagcacaccataggtctgaaaaactgcatcttagctatgtctaccctaattaaataactgtgtgagactcagttcaaaccaatattcctgatatgagtaagaaaccccttggtagatttctacagttacaaactaaaaatattttgctattaaggagtaaataacttgtaaaaaagggaccagggaggactgaatagagattacaacaatcaattataaatacagatgagccaggagagctgatgctatcatacttcatcattcacattctcatcattagaatatataacagttaagtgtctgcagcagagcttgcttctctgtagcaagagatgttaatttctaaggaaccaaaccagtgacagtgagattcaggaggggctgggagccaaatgattggactgtaattattctgaaagggcttttatcatcattacctaacattttgcagaggcagcatgtttgaaaataaactatggccaagatagtgtcacgtcatcgagcttctggtttgctgatgtatttttgtgtttgcaaggatagatgactacaaatgtactcaggcaagcatgtatcattttcaagttattcagccaaggcatttgctttgccacagattaattgaacgacgcatacagttctctggccctatcaaatgcgatagtgggaagttttcattcatttttccttgccatgataattcctacctgaaaatcttgatcacttactattgagatgttacaatagtaatgaagatgaattaaactcctgccatgaagattttctaactgctgagttcttgtagcaaatgttttaactctcccccttgtttacacccttaaaggacaagctaattgtctgtttaactttgttaggatgctttaataataaggctttcaaggccattaacagataaagctgtttctataccacaaggatgtttaaatttcacctctgcagcatcaaaacattcattcacatccttggagttcatgctgaggtagaaggaccagtgggcagtgtaatagactaaatagacacttttactttaataaaatggtaatgacagtaactttgtgtgagtttcattctatcaccccacacatataattataaatgtcagtttacaagtatgcataatatatgtgcatggataataacttgacaacctctttctgttatctgcaatctaattatagtacaaggacatggaagttaactagctatggtactaagaatcttgtcaagaaaagacccagaaaatgagggagtatgacttacttaatagtagcacattctgagaaagtgcatcctatgtggaaacaaatggctttgggaagtaaagaagtgacatattagtctctagatagatttcagattgagtaaaaaaaaaaagttctcctattttacaatctgagattagttctcttgaatcatgaatctaaaatgtctttgagcatcttagaccctacactcctatgaaatatgaccttgaatagaattgtattgatgatacctcacttttacctataacacacataatgaagatagtttttaatcatctgaaatcaacaaatattttctccgctagcatctcagagactcaagtcttcttcttataagatgttgggaagaatgggcatgatcacttcagtaaaaatccagttaagccaatctcaattttgagcttccattactactcacttttgaggagggtgatctcaaaggtggagaaagttggtgagatcactcatctatgcaccaggctccagcagagcagcagtgctcttatgaattaccttgtcttattgtatcttgttttgttttgtttggctatagtctcttggaaacccgctttcttttcttttcttttcttttcttttcttttcttttcttttcttttcttttcttttcttttcttttcttttcctttcttttcttttcttttcttttctttttttattagatgtattatttatttacatttcaaatgttatccccttttctggtttcccctcagaaaacctcctatcccatcctccatccccatgaccaccaacccacccactcctgcttcttagccctggcattcccctacactgggatattgagccttcactggaccaaggacatctctcattgatgtccaacaaggccatcctctgctacatatgcagctggagccatgggtcccttcatgtaccctttgtttcgtggtttgttcctgggagctctgggagtactggttggttcatattgttgttcctcctatggggctgcaaaccccttcagctccttaggtcctctctctagcttctccattggggaccctgtggtcagtcccttggttggctgtgagcatccacttctgtatttatcaggcatttgctaagcctctcaggagaaagctatatcaggcctctgtcagcaaacacttgttggcatccacaatagtgtctgggtttggtaactctatatgggatggatcctcagatgggacagtctctgaatggcctttccttgagtttctgctccacactttttctctgtatctcttcccatgggtattttgatccccccttctaagaaggactaagtatccaaactttggtcttccttcttcttgaattttgtgttgcctgtaaattgtatcttgggtagtccaagcttgtgagctaatatccaattatcagtgagtgtataccacgtgtgttcttttgtgattgggtttcctcaatcaggatgatattttctgctggcaaggatgtagagaaaaaagaaaactcctccattgctggtggggttgcaaactggtacaactactctggaaatcagtttggcagtccctcagaaaattgcatatagtattacctgaggacccacctatatcattccagggcatatacctagaagattctccagcatgtaacaaggacacatgctcctctgtaaactctgaagacatttctaaaacaagatactggtcttcagcatgaaacagatgacctcaaggccctaatattcattatgctaataaacaaatatatttcctggcagactacaacagaagtcagggatttcacatgatagcagtttggtatgactgcaatgagatttatagcctgagtgtgatttactgctcccacgggtggttcaaagcagatcattaagaagactgtgttttgagcagttggcatttcttttcaaggcgatctattttctgttctaaaaatcattctatcagtatgcatcaaattcccttatcaaaattcagtttttataaaagaatgtctaaaaaaaaatcttttgatgccattttgataaggctttgtataagcatctgtataagaggtaaagaaagaaataagaatcatagcacaaaactgtagaatagaggataaagtcttttactttgaagtttgctgatccaaaaagaaaaaataatgtttttatataaaaagtcattttaaaatgtacaaataatctttttgtgctattaataaattcagaaaaataagttcagcttagtaataattggtagttttctacatgctttttcttattctgaggactgatctatcattttgtctaagagaacatgtccccctatagaaaccatatgttcaaacatgagaacatcagatgaagtgtaaccatgatcagttatcattctcttatagcctctcaaaactataagcttattattattcattttatactatttttgcagtagaaattttctgatgtgaaagttgtcttgttaccatgataaccattagccaacagagaacatatgggtatctgactggtttgtctgaattacatagaaaaattatgattcaataatggaagactcaaactcagcccttgagtaactttaataggatcagcaatgtggcatccacaatactatgtgtcattctgaagactatacaaatgatacactaaatggaacaaacacaactgttctcatacacatacacacaaactgtcacacatgcacatatacataaaacagacacacctataccaatgcatactcaaacaaacacatacacacatacatgcaaacataaacatatacatgtacatatatactgaaacacatatgcacatatatacaatcacacataagaaagagaaaattcttttaataacccacctctctttacactcacatttaaaagaactttaaatgccatccttagcaatgcaaagcatagttatatattcatcatgtatcagaaataacttccagtgcctattgaaaacagtgcaagatgaggtggtgatagtgagcaataccactcaaggagacagaagagagggaagaaaaaagaatgaacatgacttgtaaaaataaattgtactttgaaaacaaagaaaaaattctaagacaaccacaatcaaaatgtcatgtattgatcaggttcttaggacattaatgtatatgacttcttttgtccgagtcacatgatctgtacttcctcagttttcagttttggagttgttatattttataatccatgagattctttctatatctgaactccatatttgctgcccaagtatttttcagtgcacagagaactccatttcaaagttgtgattgaagctgtgcaagaagaaagaagcttgaatctcagctttcctgaatgatcacatttttatgaactctgcttctcctctctgcatctcccatagctaagaaatcactttttaatctcagctctaccaaactgttctgttcttaccctgacaagtaagaccagtagcatgtgaaaaagcaaacttgacccttgctttgaatagcatgatttagaaatttctccatgggcaccatggatctagaatttattggaaacttctggtaaacccaagttaaatatgttaactgctgagattccaagaaagactggcttgattcttcagtagttctgaggtatcagagaatatgaaaaccaagttaattctttgtgcacaagaaagtactagaccacagtaaaaatatgttcgatcagatctagctagtgttctatttcactgatcaacatatattaaatgttccctaccttcctgatgcagagattcattgaggatgcctggcactgaggtcaataatattgaatgatcactgccatgccctaactgtgacgtgacattcttcacagagatagaagctttaagcaagctaacttgtaatgctaataatcacagtgcagcttctgggttatttagttaagtttcttttcttttaattggaaaataataatagtaattaataataatctttattgactataatgtggtttattgttattaataatggctgatatgtattgagtaatcctgggtcttgtggtaggtacatttgcatatactttgattattaattaagttaggtttgataattgcatacatgtgaatgatgtatgttgattgtttactcttttgtttttttttccatttttattaggtatttagctcatttacatttccaatgctatccaaaagtcccccatacccacccacccacactcccctacccacccactccccctttttggccctggcgttaccctgtactggggaatataaagtttgcaagtccaatgggcctctctttccagtgatggccgactaggccatcttttgatacatatgcagctagagtcaagagctccgggatactggttagttcattatgttgttccgcctatagggttgcagattcctttagctccttgggtactttctctagctcctccattgggagccctgtgatccatccattagctgactgtgagcatccacttctgtgtttgctaggccccggcatagtctcacaagagacagctacatcggggttttttcgataaaatcttgctagtgtatgcaatggtgtcagcgtttggatgctgattatggggtggatccctggatatggcagtctcgacatggaccatcctttcatctcagctccaaactttgtctctgtaactgcttcccagggtgttttgttcccacttctaaggaggggcatagtgtccacacttcagtcttcatttttcttgagtttcatgtgtttagggaattgtatcttatatcttgggtatcctaggttttgggctaatatccacttatcagtgagtacatattgtgagagttcctttgtgaatgtgttacctcactcaggatgatgccctccaggtccatccatttggctaggaatttcataaattcattctttttaatagctgagtagtactccattgtgtagatgtaccacattttctgtatccactcttctgttgaggggcatctgggttctttccagcttctggctattataaataaggctgctatgaacatagtggagcatgtgtccttcttatcagttggggcatcttctggatatatgcccaggagaggtattgctggatcccccggtagtactatgtccaattttctgaggaaccaccagactgatttccagagtggttgtacaagcctgcaatcccaccaacaatggaggagtgttcctctttctccacatccacgccagcatctgctgtcacctgaattttttatcttagccattctgactggtgtgaggtggaatctcagggttgttttgatttgcatttccctgatgattaaggatgttgaacatttttttcaggtgcttctctgccattcggtattcctcaggtgagaattctttgttcagttctgagccccattttttaatggagttatttggttttctgaagtccaccttcttgagttctttatatatgttggatattagtcccctatctgatttagggtaggtaaagatcctttcccaatctgttggtggtctttttgtcttattgacggtgtcttttgccttgcagaaactttggagtttcattaggtcccatttgtcaattctcgatcttacagcacatctaaaagctctagaaaaaaaggaagcaaattcacccaagaggagtagactgcaggaaataatcaaactcaggggtgaaatcaaccaagtggaaccaagaagaactcttcaaagaattaaccaaacgaggagttggttctttgaaaaaatcaacaagatagataaacccttagctagactcactaaagggcacagggacaaaatcctaattaacaaaatcagaaatgaaaagggagacataacaacagatcctgaagaaatccaaaacaccatcagatccttctacaaaaggctatactcaacaaaactggaaaacctggacgaaatggacaaatttctggacagataccaggtaccaaagttgaatcaggatcaagttgaccatctaaacagtcccatatcacctaaagaaataaaagcagttatcaatagtctcccagccaaaaaaagcccaggaccagacggatttagtgcagagttctatcagaccttcaaagaagatctaattccagttctgcacaaactatttcacaaaatagaagtagaaggtactctacccaactcatttaatgaagccactctgatacctaaaccacagaaagacccaacaaagatagagaacttcagaccaatttctcttacgaatatcgatgcaaaaatcctcaataaaattctcgctaaccgaatccaagaacacattaaagtaatcatccaatctgaccaagtaggttttattccagggatgcagggatggtttagtatacgaaaatccatcaatgtaatccattatattaacaaactcaaagacaaaaaccacatgatcatctcgttagatgcagaaaaagcatttgacaagatccaacacccattcatgataaaagtgttggaaagatcaggaattcaaggcccatacctaaacatgataaaagcaatctacagcaaaccagtagccaacatcaaagtaaatggagagaagctggaagcaatcccactaaaatcagggactagacaagtattagccagagcaattcgacaacaaaaggagatcaaggggatacaaattggaaaggaggaagtcaaattatcactttttgcagatgatatgatagtatatataagtgaccctaaaaattctaccagaggactcctaaacctgataaacagcttcggtgaagtagctggatataaaataaactcaaacaagtcaatggcctttctctatacaaagaataaacaggctgagaaagaaattagggaaacaacacccttctcaatagtcacaaataatataaaatatcttggcgtggctctaactaaggaagtgaaagatctatatgataaaaacttcaaatctctgaagaaagaaattaaagaagatctcagaagatggaaagatctcccatgctcatggattggcaggatcaacattgtaaaaatggctatcttgccaaaagcaatctacagattcaatgcaatccccatcaaaattccaactcaattcttcaacgaattagaaggagcaatttgcaaattcatctggaataacaaaaatcctaggatagcaaaaagtcttctcaaggataaaagaacctctggtggaatcaccatgcctgacctaaagctttactacagagcaattgtgataaaaactgcatggtactggtatagagacagaccagtagaccaatggaatagaattgaagacccagaaatgaacccacacacctatggtcacttgatcttcgacaagggagctaaaaccatccagtggaagaaagacagcattttcaacaattggtgctggcacaactggttgttatcatgtagaagaatgcgaatcgatccatacttatctccttgtactaaggtcaaatctaagtggatcaaggaacttcacataaaaccagagacactgaaacttatagaggagaaagtggggaaaagccttgaagatatgggcacaggggaaaaattcctgaacagaacagcaatgattgtttactctttacactgattttctgttatctctctctaccatttaccaaactccctcaccttttcttctaaatggttttggattgggaatatctgttggcatcaatagtgggtacagagctaaagacaatgacttttcctcctcctaactatatcagtagcaagcagtttagcagagagtggtgtggccaacccagctactcctctttttatttttatttctttttgtatgtctgttaacacacctagttgagccttgtccagaagatggcttgtctcagccctgttccccatcttccagctcttttatttctctgacatcctttcctctgtgtttcctgagcttgagagagttactctaatatctgtttatggatgagtactcaattgtttcttattttcagcaccctgtgaatttatttatccctgttcattaggaaaaagaagcatccttaattaaggctgagagttacaattggctaagggtataaatatagacattgagaagtcagtttgaacttatttaaatatggctaaacaacagagtgttccttgggagggattgtgattcccatgtcatgggcttttgaacaggatgacagtatcagatatagatttctttcagtggagtagatttccaatccaatcagaaagcagtgaaattccagtgtgatattctgaagcatgcaaacatggtaaaaagacttatcctgctgggcggtggtggcgcacgcctttgatcccagcactcgggaggcagaggcaggcggatttctgagttcgaggccagcctggtctacagagtgagttccaggacagccagggctttacagagaaaccctgtctcgaaaacccaaaaaaaaaaaaaaaaaaaaaaaaaaagacttatcctttttatctagtaagtattgtatctgttgatcagatgaatactttatctctcctttctgtgccaactgttcctcccacgactggataagaccaatctagtctctatttcaatgtgatcaaagtgtttagattccacagctcactgaaatcagtatttatctttctgtacctgcctaattctacctaatatgatgtcatctaggacttttaaagacctaacaatttattctgtgtatgatccggaaattccatcacatgttagagaaactcccaaaggaatggaaatcagtatgtcagaccgatatcagcacaaccatgcttattgaaatattgttcacagtagagagtgaatagaaacaagagttcctgagtgaatggaagaactaaaaacaagttcaaatacaccatagaacaatcttttacattcaaagacgttttactgcatttctcccttgctctgactttattttgtggtggacgatctaattgcccatagatttgctaaagttattaggaatgcttttggagagatgtgtctacagatggaagttgttattggatttaaactggaatttctcttcgaagtttgagagctttagaggcaacgaacttctgattgctggggaactgacagtttcatattgttgatgaatcagctcatctaaataaggaccctggtattgaacaccattcatttaagtatcaatatatcttattgatggtggtgaaggcatggagagaagggtttgtaggcagacagatgataagacagacattgagatctcatgcttgtttttaatggcagttttgattgcacagagtcctcagcaggtcaattagaattatatagtttattgtcatgtcctctagaagtgctgccggtgaagagttgcctgtattgctcagaatttctagaaggttcaaacagcaacattaacctcttctcacagagcttaatttgatattactatttttttttttttactcaaaccaaataaaatggtcaaagaaagccaatgtctttgtccatgagcactatttgcacttttttgttgggtggacctctaaaatggcctctcattcttcctttgctactcactgtttatactccttatctggatgttaatcagaaatggaaggcaaaacttcttctcagggactgtgcattgctcttctttgaccacaaaataacttccctctggtgactgtctttagctctccctcaggtccaattcagttgcatatgggactgtgcggatgaccataactgtatttacaagagcacattttctcaccattccatttgattgctatgtgagtcatcctgttacctcatcttcgtagcatgaaatcgtagcagatactgaatgaacactacttacttgttgatttattttcacagtctctaagtgtaagtgcaacaatttagttgatattaattcatggctatatgtttaaattctaaactatatctgaaacatgatagccagctactcagtaaattcactaaatgagtgggctcataactgaaaaattaagaatatgatgcccaatattacattcacagtcacctacatgcatttaaaaacaaaacacacgagcaaggaaaatgtttatcatttcaaactttcaataaattgaaatttatgcatgaatatacttactttttcatgtcattttataaagagcaagaaacaaaatctctgttttgatctggaacaacctatatattgaccccacggcataacttgtctcatctatacatctactgaatttctcagagtaagccaaagaacttctgtggagtaaagataagatagtgaaaagtgctgatgttcttctgagattaggactgcaatcgttccttcatgttcagaagacattattccacaagtcttcactattaaaccttcttttccagtctataatgttctgtgagccttgtgtaagtgtatatgtggtacagatgtcacatgtacagatcaacagaccatagtcacttaatctattcactttgagcagtagagagtctctgtattgattactatccattgtgacaagatctaagtagtatgcactacctactgagagaaaaactacacaagatcaaggcaaccaatgcaagagactcatgaaactctacctctagctgaggagctactgactgatgtagatataatggaaagacagtaggtttcattttgtagtacagcccatggaagattacccatcatccaaaggatgatgtctttcagccatgtgcataaaagtggcatcaattgaataaagtgggttatagaaaaaggaaaaagaggaagagggaagaggacataaaggtaggagatggacatacagttggagttggatgatgatttagccaggcagggattgagagaaaatataaatgcttttatttgtgaggggaatcatacaatagaaaccccacactgagcttcttcattgcatttgtgggtgttttttttgtctgtttttgctttcttattttgttttgttttatattgttttggggggagggtgtacaatgtgcatgcagcagaatctaggaatacatatctattttcattattctgcttttatattttagttagacaagagggaaggtcaacaaaacaagagtgtagcaacagaaaatgcctgacacatatacagcagaggactgcctggtccaggcttagagaagatggacctaacactcaagatacttgaggtcccagggagtggagaggactagtgatgttgggaatggggacacaccgttttggagactgggaggggagcaggatttatgagataaggaatagtcaaagggtggatcaggaggggcataataactggaatgtaaaaaaaaatagataaataaataaataaataaataaataaatgcctttggctacaatgagaaaagaatggtgtgaaataaggaaacaaaacaaaaagaaactaaaaccccccaaacaaaacaaacaaacaacatcaacaacagccaaagagttgttcatataggagtttggaagctgttacaatgatttaagggatcaatttagaggaatcacatgcattttgaaaatattataagattaagagatgcaagcaaggtttcagggatccaaatttggaatagagaaagattgggagattcaaattttatttgggaaatagagctaagcagactgattgttaggatataagcacacgaaagaagataaggatttgtatagtagataatgattctggattgtttgaatcgatgcaatagtgtaagcatatttaagaatattgtcattagaatgaggagatataattgtttcagtttgagatataatgtccctgttgaaatctatgtccagacacatatatttgtaataacaaaaaaaaagaatgccatggatttgaaagagaacaatgagtttgtttgttttcatggtacaaaaaaagaagaggaaaattatgccattataatataaagaaataattaaaaataaaaattcattgatttttagatatcttagatattttagtatttcttagatgtcatgggctcctctattctaaatacatcaaagtgtcctgctatggtaactgaccattaatttgtcaacataggatacctgagtattttcaaatatcagctattttacaaaacaaaaatatatctgttcttgatgacaacagatgacaagttaaatcaaagtgcccatttgctatttatgtggtagacatacactataactttgaataaattggaaagtaaattaatcataacagaatgataataactgaactcatttctgggcagagcttattaaatagacaaatgtaaactaacaaaaacaaaagcaataactcagtgattaaaaaaaaaaaaaaaaaactagcaccaaagaataaaagaagaagatcctgtactaatgttaatgagatgatcatttcagctatagttgtaaataagtttagcttgggagtgtgtagtttacattcaattaagcttatcacagaaaagacccatgtttagctagcaggaagcacatgaaggggctgcaatgctagttaacctttggaaacaaaaaccaagaagtatagaaagttgacacattattggaccatcaatatagcatcagtatttttccttatcattttcctacactgaagactggaccacttataaattatgtatttgtattgaaagcaccagaaatgtaatagttgactatttcaaagatcgatatcttcacagatgtgcatatttgtatctttattttatccttaccatttgaatgagcaaccagcaacagaccttagacattaaactggagataatgtttctttgcactcaagtattttgaaaggactttaaatgataagtgtattcaggttacaatttgtctgtgaataacttaataagttcagctgacaattgggttcaattatgatacccctcgtataaagttacaagttttctttcttatttattcaaaattatgttttatatggttgtcatcagaatagcacatgggttctttgacttaacttatcatctcttatagggtaatgatcctttacaatactcagggatcctacactgatatattaatggtcagttataataacaggccatagaaatgtattttgaatgaagcaacctatgaccttttcaaaatactaaaatttctaagatatctgaaacagtagagtttttacttttaattataattgcatatttttctttgctttcttccatgcaaaaatgaccatatatgcctcctctttaaaaaacatgttcctattttcattaattttttgtgacaagcatatgtatatatacataaatccatatttatccctaaattcataaatacaaatgaattttgtatttctcatgctgcaccatgttgctttcatgtgttttcagggttcactatttgatatgagcttatccccaaaggacacagtctgctgtgccaattgtgtgattacaaaggcgaagtctctcagtatctatatagtttgcaattctaatatctctaatatggagaaagtaccctctcacttactgtcctggatcattcaacagcaatttaaaatgatatccagagaattattttggagaaaagcttagagaatgtatatcgatcatgtgtataggggccatatcagagaagagaataatttcttagatattctagtgacattggatttgaaatctatgaactccaggttcagtgagagatcctttctcaaataataatgcagagattgaagaagatgtctggtttcatcttctaagccccatatgcattattaaatacttatatatgtgcaaatgtatatgcacacaatcttgggaacctgtgtgcatgagtgctcacacatgcagacacatgcatgcacatatatgtgtgtgtgcacatgtatttcatttaactcatgcaacagtttctatgcttatttcaggactatggacctgtctcacatgaatttgttcaggataacttgctttatctcgtaaacacagagggtgatatcttattcttgctttggtttcatcttttctttctgagctcggtgtgcatcctactttttcttgtctgtgtggtgagcctagataaattttaggcaacatatgaggcaggtactgcattcatattcttctatagctgccaatgatggatattagtagtcttcaaaatacaaacagaaataagcatacacttcacactagacccttctgtgcctggttataatcaagactacaagcatctatactgagtcactagctaatttttgctaagtaatccaacaaacatatcttctttttttttttctttttcttttgtgattttttgagacatggtttctctttatagtcctggctgtcctggaactcactttgtagaccagactggcctcgacatattttcatgagaaatattactgttcaattttaaatagaatttttcgttgtgtggtagttcatctaaggtcaagtttgcatgctaagtcaagaagatttgctttcagttgaaggatcacaattcatgacttatgtgtgtttccctttgatgatacactatccacatttctttaaaaaatagtatacttgaaagtaagtcttctgagtttggacaaaattctctcctagtaattaccataataatatttattggcacagatacaactaaatctctgataactagaaacaatttctctgatcatggcttctctgcatataggggaaattaaaggacaatattaaaacatttgtttattttataatataaaatcataaattttatactttccattgtttgatctccttgtagaattttcttggatagtttttttattatgtcaaaggttatccactttgaagtcatttttaattaaataatatcatgcatagggactttttactattatgttcaaagaccaaatcaaattataggaaggaaaatgttgtccaggcacatatttaaagtagagagcttatttgtgattctcttataaagccttactacatatataagcacatatgttcatgtccaacagtgttaagaattggtagactagaatttactatgataccaggctgtacttgaacttgcagaacccctctatctttgcctccctaatgatgttgttatagatggacaacatcccaaggtgacagcagaggggaacctggacatagaacaatctacccatgataagttctctatgaattgtgtgacaatgtgaataggctcaaggaaactgctgtagtcatgtaatataactgagaggggctagacttcattcattagccatcttgtaggctatgatttattttaattaatttccatctgtgttggaaattatacaaaatattcaataaaggaacatgaggaatgcttgggagtgttttattttctcttagtcttcgaattgttatgagaatatttataaatagagactggaaatcatttgaggatagtttacaaatttggaggcaattgacttaaattttgtcttttactttcaatgatctttgattactcctcctcctctttctcctccttctttttcttcctcctcctcctctccttctcctccttcacctcctctcctccccctcctttgccacctctgtctctctgtctctgtctctgtctctgtctctgtctctctctctttctctctctttctgataaaatatatcacacagcctcaactagaatggacaatggcaccagtctttccttgaacttgcagaagtcctctgcctttacctcctgaatggggcatataatatcttacctgttagcaaaatttgaattataaattttaacactctgcatagcattctgtttacaattgagcatgttaatttaaacataaagttcattttatattaatttgtaaaagaaagaagatagttctgttcccaatattcacgtgagggagagtgatagccatgtgaagtgtttgtcaaagggcattaactataaagaataggcgccttcgcctactgtctcttcaacagtgagatgagaacatgcagggatgaagtagcgattttcttattcacttcatttctgaaaacaaataactaaagtatcaggcaacaattcttcaacctccaaaagacttgaaaacagttacttcgggatcaaataacaggctattccaagggcctatcttatctgtagctcccattggtttctgatggttctgtacatgatgtatccctgcagcagccattagtaattgaaattgtattagatgagagctttttttcttgaaacaattcaagaattgccacagaaactattcagacatgtctttgagcaaaggaagataatttaatttattgatgatagcttatattttggaagcaaactttttgtgtctattctgtacttcaccagtcatcaaatgtgtcagcaaaattattaaaacctctggctttggctttcttatcatatttaaaatgaaattatataaaaatcaaatctgttaattatgaaaacaagagatcaatctttagcatacagatagtcaataaatgccaggtagacctgcaacacaaggttttgatccacagattatcaaaaaagaaaaagaaaatcacgtgcctgcagaagtcgtaggtctaggtctttctttttttggttattttatttatttacatttcaaatgttatcccccttcccagattcccttccacaagccacctctctcctccctcactctctgcctctaggagggtgctcctctacccgcccacatactcttcttacctcactgccctagcatttccctaccctggggtatcaagccatcacaggaccaagtgcccctctcccattggtatcagacagtgccatcctctgccacatatgcagctggagtcaaggatctctccatgtgtagtctttggttggtgttttagtccctgggagctctcagaagtctggttgtttgattatgttcttcctatagggttgcaaaccccttctgctccttcagtccttcccctaactcctcctttggggtccttgtgctcagtggaatggttgactatgagtatctacatctgtattggccaagcatgtcactcttatcttccctatccattgacttgcattaataacaacatgcaaatgattagtagttacaacttcttaggaatagttgtaatagcccttcaaattactcagactaccttctaaaataatattcagtgcagtgtgtagtgtttatttcaattttgctattcactgtaaaaattcatcaccaatgagcatcgtagatgagggggataagacctgaattattttcctatgaaagatagagttttattgtcacataagagtaaaaacataataatatttcctttatagactctaacatttttgagagatgccattgtatctatttgatagataatagcattatttgaattttgaaaatattactgagcttgtataattatttatggcgtcacaatctccttcaaagtagctattgaacagcaaattttatatataccattttattgttaatttacttgtcacttttaacatttgttggctgttcagtaaatattaactgctattaacaattgtagtaatttctttttaattggtggacatttatatgaaagacagacagatgctgggcagtttctgcttggtttaattaggtgacactgttctgaatttcagccaaggaaaccgtagcaacacagtaattttattattagtgttgattagatgtaggtatcagaaaattgattcaagttgtagagttgattaagtgaaatggttcttcacaatttgattactttcagacagataagaatgaagctttaaggtcaaccttctgtagaaaggaatggtgtgatttaggtggtaaaatattttttttattagtttcactacttgataacgaaatggcctgatctactagtactgaaggaagttcatgttctctatctttctgaacacagatgtcactggcatcatcacagttcttgtccaacaggcaatgacagtaagtggctgcaaattagtaggaaaattaaacattatttattgtagtgttgttctagaaaagagtttattttctatttaagtatggcaaaatccttccacagttatacatttgtaaatttaataagtgctgagagtaaagttgttattaaaatgtttggattacatatgatcttacagaaaagaacaaaaaccctgtccacatgcatataaatgccgacttatatatgtacctaaagaaagtgtactttgctacttttactatatctattatgtcctcataaaacttagagcattgtaacagaatgaattcacctccaaatctaagtcctgctgctaataaacaatcaataacttcagtcagacatttaactcttctaatctttagtgtactggagagccagggatagtgttactaatatccatcacagaacactatatggacagattctggtgatatctataaaatgctgatgagaaataagcctcccactcatgctggcttgcctttactccctggcttgatttggaccatgttcaatcaattcagttagacaaatattgattgcttccctagagctatgtttgactctaggaaaacaatagcaattctgagtccttgcatcttttcggtgattatttagttctgcctgactgtactcttatctgttacccaatctgtttcagtgtcatatatggagctagattaatggaattaaccaggagaaacagggggagtctaaagaaaacgactattttcagcagaggtctataggcatatctgagtaagtgaatatcaaccctgaaatcctctttttttcaattcactgaggtgtattgacagttctgaggtgctctgtggttgggaatagagggttatgaggagcccagaagctcaaaagtttgcaggggagcttcagacagatgtggcagacttcactcactcccttcaagggctcaaggacattaatataaaatcacagaaagtgacatattatctggtttatggaatagctaaataacagtagtttccattgttcacaacagttcctagtcatgcattatctcccttcttcgatgactcatcctagatagcaatattagcattatgattcaaaacctttatcttgcccttatggtatttatttcctacacttatctgttcaccaattataattttatgtgcttgtggatacatgttagaacataaaattttaactaatgattgtttctgaccccaaggagtttacattaaattatgaattgatatttgtgttaaaataagaaattctatcccaattttgctcttgttttataaccgtagaaatcactaagcagagactggggaaagccaatatagaatatgcattgttgtatcaagttttaaagatcaaacagttttaatatatatttttatgcaatgttcaacattgaataatttatatgtcatattgtattttgtgctacaaggtaagattgattattatgctttttaaagctaaataaatgaaaacttaaagtccatatttcattaatttaagatgacagtattagaactgatgcaaacccaaagttttgtgactctgtttaaattattaacaactacaagtcaacggagggtctacagaggtttaactgaataatgtgaagttaaacattgtagaatatgttgcatctgttagtttccatggagatcctaggtaaatgctagcaatcattttgagtagtagaggaggaagtttataagctacatgtcttagaagaaatttcaactctctgagctacaagttccctgcaagtgacaatgttaataatgtttgcctcacctcttggttgtggacataaagtgagtctgtctaacatgctaaatgtagcacatagagcagagtaaatgttccttttcaaatctactaaacaatttcctttcagtcagagaaaaaaaatctgtgatctgtatcaaagtaatacctttgaattataagtaaaatggagatcaccgagatgtttagtaaatgatattcatacttcctgattagattttaaattagtttaaaaatgggcaagatgaggaaacaatattggaatgataaaagaataatacattcattttcttgatggtgaaggtaatttttaatttttttattacatattttcttcatttatatttcaaatgctatcctgaaagtcctaaaacctgtaaagatgttttatcctcacctctcacttgcaaagctaaaggtgatactagggggttgtttataacatggaagaaaattagggaatcagggttcttggtaaataacaatatgcatgaatattatacccagtgtaaaatctacaaaaatttcccatatgggaagcaaaactgcataatgaggactagagaagacattcatattcctgtctttcttatcaatagaagaaaatattagaagtaaattaaaattgttccatttaaccatagggtgtagtgagcttgatgtgttttgtattgatatcccattggttgaactatccacacttgctagtaacaccttctatgagttttggacaagccatttgatggtaaaatttagaaaaatttattgttctaagttaaatgatgagatcataatatacgaattgagagaaacaaagtaaattattttatgttaacagaaagtaaactaaaattaaagtaaatataaattgataatttgtacttgaatcaatatagaggaaaatctgttcaggacaccgaatatcaatggaggcacttgccaccctttttcaaaaaagaagagagaatgaggctgaccatctcaacagcatgtgctggaccaggggtacagtaaattctgtggccgtttctgcatttgaccaacagcattcatcattgtaaagaaggcagtcatgcacctttcttgcatttgtcgtgagtttcactgcagtttttttttcctcagtggatcccatctactgataactttcagaaatttctcacaatctattttaaaatgctgtttttaaactggtatataacgtcatggctaaggacatgtgctttaaaatcacagacagaaatgtggatctaaggtttgatggagatttaacaaacacatgtgactctgcactctctccatagattataaaaagagtagatgtattcaaatgtgattgcagtatctgatgtaatacaaccaatgttctaccatggtacaaacaaggagcattatattcacttgaacaccctgtagaattcaacctagctgcctgggctcagcctatctattcgagtcaacattcttcaatattttagtttccattcatagacttagagtgcacatgtgaaaataagcaaacaaagatgtcaaactccaattcagatataaaacagtgtcctatttcttttctctgtgtatataattttatctgtcctgtgatatagatgtcattaatagaaagctgacaaggcacaaaaatgtgtctttcaccttagaagcaatagaagatagtttattctagtatcaaatatggccatgaacacagctttagattacacccagtacagtgtccctgcatggtacttgtcatatttttaacaataacagcatgaaaaaatttcagatgtcaaaaatgcttttcaaatcttttgtttggtgcattaggcaaattacagccaagtgggaaatgtcttgccctcagattctatttgatcacagagttagcttttgacttgatggaatctatttatatattccaaaattatttacctaatgctcacaaggatgttaggtcacacacagaggtgagaagtataatagctatttaggctttaataactcaagagctttgaactttggacatgcaacattccgacatttcataataattaaattttggatcagtgagtctgttttgaagatgtaaatgattgttgttttctgggaatgtcagcaagtttttacaaaatacaagacttttcatagaagatcaaaggagctcaattatattatttgttatttctgccaatattgtgtttgaccaatataaatatatttagaacagaaaggtattgttaagagtataaggagatagtttactagttaaagcactaaccactaaataaataggaccagagttagaatccccatcaccaataaaatgacaggtgagtgtagtgacccttctgtaatttgaacctcagaaagtatagacagtgtattccctgagcagttttttatcagaagacccataactcgaggaattacttggaagattacatgtaaacacacgaggaatgcaccagaacttgtattcatgttcatatatgtgcacaacctacaggtgaacaccaatgacaatcaatcaatcactcaaacaagcaatagttaggtgcagtgataacactgagtccactgcattttccatggctctttcttgctgcagttattagaaagactatagatgaactaaacagtcttcatggtctggcatccctagtttccctagcattttttttcaattaaccatccttcagtcaacctccagtccagtctgtctgatctgttaggcaatcattatatgcattagttatcttcttaaaggacattgcatttatcgtgcctaggttaatttccccattccttactccttccttgatgccatgtgcatttcttgagagtgagttatttactcctgaaagaaagttgcttcttacagttatggagattcagaagtccaaaattaaagcagaagcaggttcaggaactactcagctccctgcttcaagatcgtgactcaaacctttccacctccatatggaagcaggggagcagcctatgttgccctcacattgtgagagaagatgagagctcacactcttccttttcataccagcattaagccgtcaggactaaaacatctacaatatcccatcatctaacactgttgcactggtgagttccaatttgttttgatggtgatcaaagcataaaatcatgctacccaaagaggccctatgtctttaattacctcaacttatttaagtctcaactcttacatctcattacatctaacacaattaccacagttaacactgaagcctcctcccctgattctcaagcccctttgttattgtacctttcttgatttccatagtctcttccatcctggatgagaaattttatttatttagtgtagtcatatcagcttaataaagtcacggcattaatctctggttaattgtattacctacaatgctttaaagagtgcccgcctcctggtagttgcaaaattctttgtcatataaaataaaggggaatttatcactgtaaggtagaatttcttttggcctgtttatagaaaaggaaactggtcactaagttcctgatcctctgtttccattgtgagataataagggatgaatccatttctgtctgctttcgaaaaaaacaaacaaaaaaaagatatttctcagtatctagacaagagttatgacaggattacatctaaaatagttagtacgagatgcttagagcctatatgggggcaatgcaagtaatcacgtccctcactcagcttatcaggtcttgcttcgtgtgactgcattgatgtttgtgcacacacacatgtgctactgttccttctattgctttgatcttttctaacaagtctgtttatttttgctttgcgtagatgggtccgtgggttttacaaagagttgattcagatcattaaatcctacacaaggctgaataacaaagcagaaaaatctgtcgacaaaatgctaaaacccttcctctgactcagaacctctcttttctcactctttgagtcatcctgtggaagatggctttatttgtttgattctagatttatggctcagtattcccaaaatggatgtgtgctaagatgaagcatttgtttagtgagaaggatcatattttaatttgtaaaaccataaaaagcttaaaccactgcctcaatttaggagagaggagaggaggaaggagagaaaggaggaggaatgagcgaaatgaggagataatggggaggtggggagaagatgggagagaactgtaccaagaatgaataaaagagaaacacagaaagacagtgatgagagaggatgtcccctggagttttacgtgttaggataaaacagttgaaaaaaactatttaaagaagacagcatttatcttgtatcacagttacagtcaatcatggcagctttcaggcagctgctaccattgtacccatatggagagagaactagagaaggggagagggtgggagggaaggagaaagaagagagaggagaggagaggagagcagaggagaggagaggagaggannnnnnnnnnnnnnnnnnnngcacctaactattgcttgtttgagtgattgattgattgtcattggtgttcacctgtaggttgtgcacatatatgaacatgaatacaagttctggtgcattcctcgtgtgtttacatgtaatcttccaagtaattcctcgagttatgggtcttctgataaaaaactgctcagggaatacactgtctatatgagaggagaggagaggagaggctagtgctcacctcttttcttctttgaattcagtacacagtctcagttctcagaatggtggcactcttttaaggtgaattgttcccattaaatgttatctagaaggccccatacagacatgaccagaggttgaatatctaagtgatttgatatcacttcagtttgaaaatcagagttaaccaacacattagatattctgctttactttgtagcttacagtaagcttttgaaaggaaaagtaatactgtctacattaggaaggtcagattagagaaggggaaaacacattttatggtgttctcctgtatcctatgaactggttatgtcctcggttatgtaataatttatcttctgtcagagatcatcttttgaggtgggaaaacacaaggctgctttctgtattggaacaccatgtggggtaatggtgaattaatccatttcttccaggagtcaaataacattgtccatcatctcctctcctttcttctcccctcttctcctctctccattcccatcatcttgactcccctcccatctttcctctcttctcctttcctcctctaaagcttcttgtgtgtggtatattcatgaatatggaaacatttatccatatacttagcggtggaagttcagagaacatcacattatcatcaatcactgttttgacagtgtttctccctgaatttgtgtctcccctttgatttgggctggctagtttataagaccctagtggtatggttacaaatatgctctacccactcagcatttacatgggtgatcgggatctaaacacagagaactctatgttttcacaacagttaccaacagactcatttccttaggcctgccaatttttcttcatcaactttaatgtctcaatacctgaactcatcttaatagagtactctgagggtgtgatggagtttcaagataaatcacaataacacaggatgtgtgaaaaatatgttattttgttctagatttatttttaattatgtgtcagtgtgtatatttgtatgtagataggtgctgtggaagccagctctttcagatcccctgaaacttgagttacagatatgaggcacctgatgtggtccttgtaaatagaactcagcacctctggaaagtcagcaagtgcttttaatctctgatccatcttcccagcctcaaaaatatgtttgtggtgaaaggaatttgaaggaggtttcatagacatgtttcttgcaaacatataattcttagcttcgaagtgagtagaaacgttggggctgcgatggtccatgattcatcctttgggttatatactgcaaagatattgataggaatcgtgcaaagacttcacctaagctggtgttggcaaggctataggagctgtctctagaacttacattgtctacttagagcaaagctcagaaagacagcagaactgaaagatgatctttacacagagagatgcacatatattgcctactctaactatatttttcattttgatactgactagaccacactaccaagtacctttctattgtaatattatagaaagtttttttatgcctaactatttagaatctattttctttttctgaaactgaatttcccctttatcatataaaattgccccaagaaacaaccaggataatgtcattgttcaaatttatgaatctacagactttaagatgaacacattctgcttttgtattgtaaatcataccgcttagttttcaatgtaggaaggaccattcagagactgcctcacctggggataaatcacatatacaatcaccaaacccagagagttttattgatgccaacaagtgcttgctgacagaagcctgttatagctgtctcctgagaggctccaccagtgcctgaccaatgcagaggtggatgctcacagcctaccattggactgagcaaagggtccccagtgaaggatctagagaaaggacccaaggatccaatgggtttgcaggcccataggaggaacaacaatatgaaataaccagtacccctagagctccttgggactaaactactaatcaaagaaaacacatggtgtaactggtggctctagctgcatatgtagcagaggatggcctagttggtcatcaatgggaggagaggccctaggtcctgtgaaggttctatgccccagtatagaggaatgccagggccaggatgaggagtgggtgggttggggaacaggaggagggaggagaggatagaggatattcttcggaggggaaactagataaggggataacatttgaaatgtaaataaagaaaatatctaataaaaatttactattttcaaaaaggaaaaaaaaagcataaatttttaattcacttaatgaggaatcacacaaaacccttatgcttttgaaaggttttattagatctttgtaattcaatttaatttacttcaccaaatattttctaagcatattttcacaggcagacattatatattgtcctaggggaagaatataaacacaatatggtcctctttctttaggtgtgggacttttatataaattagaagtatcttatgataactgcaataatgaaattaagtacatagaaaccataggatgtattctaaagaatgaggttataattttttttttataaaaaatttcctgatcaacacacacacacacacacacacacacacacacaaacacaaggccagggttaatgctatatttttgatggtactatagaaattatcataaccttggtagcattaaacagcaaagctgtattctgtcataattctagagaccagaagtctgagaattaaagtcaaatcaaaatatttgcagggtgatactgccccaagagtctcctgcatctgcaggttccttgaattttctgtcttctgatgattggtaacatctaaatatctgggcacattccttcaacatctgtgtaaagtcattttgtaaacctctcttttatggggccatccttctttatctcctttgtaagagtgcttgtgatagcactcagggcccttgtggctaacccaggttattgttatgtcagcatcctttacttaattacattttcttttacatgtagaactggaagggtttagaaatgaggctatttggaactactattcaatccactatgatggataaaggagaaaattacaatattgtagatttaagggccaacaactatgccaagcatgctgagagtttgcttataaaaaactcatgagagagttttctttcctctcatgagagaaaagaaatcctaaacaatgacatagcaattgtattcaattaggttggggataactgtgatctagttaaataaaacgttctagcttagggtaatcttgtaaaaagtttgcctcctagaaatttactctgtgttactccatgacttacaaagtttcaataggttttaatatttggttgagattattccatttatttttcaattaaacaaaggaatccctctgttccttgcttcaggatttcaatcaatcacaatttatatatttattcactatgtatttattgaattcagtgagctacacactgccttctatggataaagatatgaataagaaaattcaaatacaaggcagttcatgccttcaaagagtacataacaaaacagaaagatgtacacactcaatatgcagtaaataaaatgtagatgacactaagttctatatgacatactaatgtgctagtggagatgacagtgtttctcacagaaatactttagcatgttcacacactaggacagaagggaagagaatcccagaactttaaatttaatatggaaaatgcatatgtgcctagcattatgggctcagaaaggtttaagaactttgattatgctggagtctgagatgaaactattggtaggagataaacatggagagagaaaaacaagcataatctgaaaaaaatataccctaagttctttctggggtagaatggatggacctgggagagaagactatcatctcatcgcatggcatatactatcataatatagcatattattacatgctattacttttgtgagataaatggaaccagaatttatcccttttcctccagaaagaagaccaacttctttataaatggcatgtcctccaagtgctatatactctgcttagttatctttggtctatgtctagttctctcattctgcacagcattacctattcacaagtcatgatggcaccccagacattcattaggccagtattggaaaataaaattatggagtttccttgaagcatcctctctcatatttgaaaacatttagtggcacaaatgggtgcatcttagaggtaatttaccatgtttacatttaacagattattttaatagtttcttttctcttctagctagaacatgcttcataaaactgtacttcttcctacagtggatgaagatattactaatgcctcccactgatccaggagttgaatttccgtgttctctacaggcgtttgggctattaagatcttcagagaaaatggtgtttgaaattaggattttatagtttagaaggagaaaagttaaaagacatcagaatgttttggaatatgatttcatataagcttagttttagactgactgtgggtatttattttacctttatcctttatgacttgtcagaaatcagataatctctctgaacatctgctccttgccagtaagttagaatcacaatctagtagcaattatttttaggaaccattcacacaggtacacaaagcacaagatacctatgtgtgccaatgtagtgtctgggagctactgaacatattctcttactgtctatagtcaatgcccaagagggaatagatgactggatgaatctgaagttacagagaaatgtatgtatgtggaactgttggcaagggtgttcaaaatacaagtgaatcaacacataagaatgaagtgtaagaatgtacagaatatgtcgctacatcaatggaatctgtctatcatacaaactgtttacttcccaaggacccaatgaaattgcaacaaataatccatataaagtatcttgaactgagatgtcatgagatatgttataaaatcatgttaatactgtttgttttccttttgaaattacctgattagaataaatcagtctttaagttgttcacatttatctaaactatttatttgtagtgtgttaagaggggcagaggtatttattacacacttttttaggttattcttatgtcaattatgtaaaatgattgcatatgtacaaaatagagactgtggcattagaaggcccaggtttgaaaaacataatttcttgcaaatacattacaaacagactaacttccttcagtcacattattcacttgcaaattaataatgcagacttaagttcctcactcaaactcttatgagattagttttgtatcacacccacaaattgaccaggacttcctactattctactcctttcctctctcatgcagatcccatgtcctggccatttaccagaatgtgatagaaaacaagacaagtctttaatactttcagtagcatggactccacttaaatcctgctcacctgctatgccttttacattgtcaacaactataagcattagcaattggaattcagctgacagttttctcagcaaggaaaaactagctcccttttaacaggaaggtctgttcctgtggagttaatcagaggaagaacttattagatcagcagttatatcttaacgttccaaaccacaacataatattttgttaagagtcatgtgtgtaaaccgttttagtgttagctgacagtgtacttatttgcattagtcttggtaagtggagaggaggaggatggttctgaaggtttctacctgagtagcgatgcactattccagtttttctcattgtttaaatctctgttctgtaccacttaaaagctatactttatattagtaaaatggaaaatagtcaatgtagagagccagagagctgagcttttaagaacactagctgcttttatagtagatctggtttgagtcccattactttcaggacaacttgcacctgtgtataatttcagttatagcgattgtctttgggtatcagtggatgatggccatatacttggtacacacacatacattcagacaaaagacttatacatgtaaaataaaagtaaatcaatgtttgtttgcttttcaagtcaccatactctgttttctgtcagaagaaagaagtatttttaaaaataccaaggtagttagtagatgactcaatccttgaagtgatctgccaccaatcctaataaccagagttcaatcatcatgacgcattaagtagaaggagaaaaatgactgccacaaattgtcttttgacttcttcaatgtatactgtggcatggtgtcctctagtctaaacacactggcatattcaggcagagagagagagagagagagagagagagagagagagagagagagagagagagagagacagagagagacagagagagagacagagagacagagagacagaaagagacagagagacagagagagacagatagaggcagagagagagacagagacagacagacagagacagagacacagagataataaataaaagataacaaaattaaataaaaataaacactagaatgtgtttaccttaaaggttaagtctcaaattggaggaaacagccaagcattgtgatcaaaacagaagataacaatgttttctaataaccttttcttgagaataccttataaacttgtcactacaactaaactttaacaaacaactagagctcaaaacaaatatttgaactctaccagcagtttcttgagctcaatggaatgagatgggaaagaaaacagccattgattttttacctgatgccttattagaaaatggcactttagagggaacctgaatgaagatagccagatagcctgatggtgatagccagagtaacgaacggcactttggtaggaaggaaattggtcagtaaaatgaatggttatgtcccaagattgtggtccatgaaagaatgtttctacagttatgaaatgaagaaatcttgacatggattcattctcaaagatcgattgacaaaaggagcacaaaatgggcactttctctattgaaagaaggtcagactgacacagtaaactatatgatcttgatgaaacatttctgatgacctctgttaaaaaagaatgtgtatttggtcatggtgccttcccaaatgcctttgacttctgtttcttgagttcttccttcatgttagccccgaaaccttcttccattaagtgcataaggttagtgaaccttagttccttgtgggaatatgccttacccaaatgaattaaacctatcaacttcccctgaaactttccatatatcccatttgtggttaagaaagcaacatgtatcctttgctttctatcagaatccttttatcctccttagctacacaatgacgtgtcacttactgcacagtcccttattccttttctctactgctgtgatggctattctaggttgcaaacttgactatatctggagtgaattaactaaaacccaatgcatatgcatacctgtgagggactttttttcttagtttaatcatttgaagttggaagatagacttttaatataaacctttgtagtgggaacactaatccaaaccttttgatgggggaaggtgtacctttaatctggaccatcccttctgctggaagactatagaaagggcatggaagaaagaagctttctctatctctttgcctgcttgctcctcattttgccaataagtccattccttcactttcattagagactacttcttcaagagaataggaacaacaatatgaactaaccagtaccctgcagtgctgtgtctctagttgcatatatagcagaggatgtcctagtcggccatcaatgggaggagaggcccttggtattgtgaagatcatatgccccagtacaggggaatgccagggccaggaagcaggagtgggtgggttggggaccagggtggagggaaggtatagggggctttggggatagcatgtgaaatgtaaatgaagaaaatatctaataaaaaagtgccttaataaaaagagtatgtcttctactgaagatcagctgaaatgtctaccatcgtgaactgaaaaagtactgaattcttagtgcagctattattggactaagtaaacaacagtttgtaaaaatcctctgtgtgtatatgtgagtattatatataaatatataaatatatatataatatacatatatacatatataggtatgcatatatgtttctttaaattccgtattttagagaatgctaataaagctattcaatattatttttatttaatgtacatgttctaaatactaaaatctcctctacatggtataaaacaaaggaatgaagacctttgctttttattctactaattgtcttaagggtgcaatgtttcatttgaaacattgtgttgtgtcaaatggtggaaattgtctaggccaattcagagtatttcctgcaaattgttctgttggaagctggagaactaaggtagacatgctagggagtaatgtatttatggctgacattacgattcagtaaatatatggataaaagaagaactagtatattgtttatatgccaggcactatggcaagtgaattctttagaatgtaacactttctctgataatagtctaagaatataaatgctaatatttccattttgaataggacaaatatgccaactaatgtattttattgctatcttatttatttacatttcaaatgttgtctccttcctattttctcctgcacaaatcctctatcccattcccctcccctttacctctatgaaggtgatcccctactcaccaacccattcccacctcaccactctagcaaccccttatgctgaggtatcaagtctccacaggaccaagggcctcccctcccaatgataccagataaataaatcctctgctacatatatatctggagccatggttccctctatgtgtattctttccaaccaaggtattttattagaaagtgattatgtataatgttaaactctaacttgaatggttcttcaatgctgtgttatacttgtaatatcccacagagctaatccagaactgagtgctattaataatttgggggtacattgatgatggtgtatggtttacaaggacattgtcataacccagttttttggtctttgaatttgcttacaatgttccagacaaaatattatgtacatatgtacattgatgtcttacaagcatgtctgttgctctagtaaaacactatgagaaaaaaacttgggaagaaagtgtttatttcacttcacatgtctcaattacaattcatcattcgtcatgaaggatgtcagagcaggagcctaaccttatgaattgatccagaagctgtgtgtgtgtgtgtgtgtgtgtgtgtgctacttactattttgctcattcatgacttactcatcctgctttcttgtccaatttaaatctgcctattcagaggtggaggagtgtcctaccctgtggtgttggccctcccacatcaatcataaatcaagaacatgctctattgactttccataggcagtctgcttggggcatattcttaatgaaagtttctcttctcaaataactctaggatgtatcaagttgacaaaatctaaactagtacaattggctattgcagactcacaaaaaaccttaacctcaaaatgcagttgtacttcattcagtttttattttttgaatgataaatgatattgagaattttcctgtgcttatatgctatgtgtacatccttttggcaatatatctaatcaatgcattttttctgcccacatatttgtcgagtctgtaattgtaatattcaaattccagtaagtttgaagatttaatcaatgaaagatgggtgacacatgttagttatatctctcatactggatacatatctccaaacatagtattttccttcatgaatatatatgactatgatttattgatttaaatcatgttgattttgaaagcataactcgagtatttcatgctttcatttgttatgaccccccaaattcaaaacaattgaacatgaaataagttgataactcaaggatggaatttttaattacttctacaaggctaaaagggaccataacgaacacagctgactagttttcatatttatgaaactataggcagttgtgaatcttcagagattattttgtctatttataaccctctgaggtaagtgagttctttgaaagttggggttaacgtcccacatatctaatttcagtaattataaatgtataggttctttttggtttcaaaaaaaagaaaaaaaaaacttgtaactaaaaaagttgagaaaaaacagaaagtgttaattgtctaactaatttctataattagaaggttattttcatcgtgccaatcattagggaatgcttaaataaattgaaatcactctagaactacacaacagaatgaagtcttagtgagtttgggtggcatactataaaaagtttgttaaatatataagttcacaatgtcaaataatgctttataaagagattttgaaggttattcatggagttttctactctgtgagaaaattatcccttgagagatatacttgctatgtagccttggctagtcatgtatgtgattggcatgtaatggttggttatcactttttgtttaattttatacttaaaatagcataatttcaaatgttttacttgaaagaaaaaatgtctatttatatttcttgctcctgtgctttagaatgatattttgtttattcattcattcatgtattcatctttgaggggatgatattgtgagttcttccacatgacttgctgtagagtaatgcccaattgatgtgtgttgaatgaataagctgaggaaatatagccattggatctaaaacatagccttattttattccagtaaataatttaatagatcaaagtgagaggatgacttctgtttctgggacaatttgctacaaattaattctagatctacacaaggaaaaacccactgtggttacagcaactttctatatgccctgagaagagagtgatgtctgatcagtaaagctctttgctatagcgtgaactgaattgctcttgaccttgagagatgataaagaaatatattgtatagtgtttaaattaatgttcatgaaagttaaatgacccaaactaaaactaacaatgagtccattcttcattcactcatttaatgaatatttaatataagaacattactggctagatgctgattgcatgtaaagaaatgcaaaaacagtcattaatctaaaagagtttataatttttttaaagacagatatacacaggaagatgaatgtgagttgtaggttaataccagactcttctatatcaaagacatcacaaatttcaggctcaaacaaattcttagaatcattcctcctcaatcctaggaattactcttcatatatagtgcttgaacacctgttctaaattacagtatgaaaacagaactgtgtttgttttattttgttttgttttattgttgtttttctaaaaaccctatagttcctgatatagaattatttacgcttgcttgtttggtaatgctataggttcatagaatgttttcacattatgcacaccatgaccttggtcttgaaaaattaataggactttgtcagtcagagagagtgagtgagagagagagagagagagagagatcttaaatatgtggcagaactcatatacttaaatttcttttttattttttattttattttattttttaatattttattaggtattttcctcatttacatttccaatgctatcccaataaacacaagctccatcttgccaaatttgaaagacaaagaatacacacatatgacatgtgccatcctggtactgatagttaatgatcatgttagtcatgggcatgtagaattactgtggatcagggtcaataaaagctttattgaaaaggattagatagtaaagagtttatgctgtgtgaatcatgatgtctctccatggagagactcccaggtcaactctgaccatataacatgaaacaatctgtagattctatgttattgtatgggtgtacatttatctgagtaaagctgcttttaccaaaataggtagcaaacatgatttgggatacatgctgcaatatggctatccctgaaatataaaatgtaattacttcatgaataaatgagtaaagatgtagaatcaattactttgaattacttatttaaaaaaatcacagataaggtgacaccttcactgaaaagaaattcaaattaaaagaacaaaaaccattgtgttatttgcaccattaatatgatgcaaaataaaaatcaggacaaagtcagaaatggatagaagatttgctattcttatatagatctacaaatttatttaaaattttatgaagctttaaaagaaaaatacgtgtagattatactatgtatttttgttttgtacattaaatatatatatatatttttttttcaggcctcctagcagtcattatgagtagcatagctttttccatttcacaaaagaattctcaatccagcttgctaagtaacttgccttcttaataagatagcaaagacagtttctcctttagtcttaatgtgcttgctttcttaactctctgatgtacttgatctataataggaaaatttaatatgtgcatcctgttttttttttctttcttcattgaagtgtttcctcaaggaaaatggatgcatattatctcagtcctaaaaaaaaataacacttccataaatctcaagcagtatatgactggagaatgactcatctatacaactaaatacaccatagttctctaggaggtgatggaggcctctgtgaatatagaggagtgggtagccaagcacagattaactgagggaatctatgatgcattaagtgtacataggaagatgcatgtgagctgtatgttaatactggactcttttatattaaagacatcacaaatcaaacacattcttagaatcaatccctcctaaccctaggaatttctccccctatataatgcttacacaccagcatagaagcaccaaattacttttaggcttcctatgatacactataaatactatatgataattattatacactatattgtgtttaatcagtaaatttaatcgtgcacatacctacacacattgaactacccagcacacagaatcatctatgtatcttttttttcagcatttatatagtactttgctaatctgcatgttgttcttgtcaggttcagggctgagttccaagttttccattatagaatctcctggaatttttattttctatttagatttgtgtgtttgttgattccacagatgcagaatccatgcatgaactaagctactgttacatactctaaaaaagtaatgagagctaagcaaagcattcttatgtattgtgttcaggcataattatttgtgtatataccttaggcaaagaagtgcgaattatgttcttgctactttaacattgtactattcagagaaaagaaatatgctcttccttttccttcatgcattttgtccttggtctctgaagtggtgtctggagtgttttgtctgtcatatctgggttcaatggccatttcctgctgtgtggctaccttgaaaagcaatcattgcatatccatgcttacagccattctattcccagctgagggccacggcagagcagagagaacattacattccatcttgagcagctctggtttatggtttcatttgctttgttcaacatcatttccatctttccttatgcgtctgtagggtaatgggtgagggggggggggtgattgaacagaaaagtcaccgttagtatcatgtttgaaagtagggattattgcaagtggcactgagcaagtggctttttttgttgttgttgttgttctctaattcttgtatattctagaaagagtgcttactgaacacaaaacaggtttaacaccagctgacatgccctttgacagtgctaacaattatgagcagactctggtttacactagggatatgacagagtaaatggagaaggatgaactacagaacaagcatgagaaactttcttgctcttcagttcatttttctcaacttcatttgcacagttgacatatctgggaagcttatattcaactcagttagccccagaccctctatagagcataattttgttaatctgtacttgaatccacaatgaaggtgaatcgtttgatcattttccagacaattgtaactaaaagtgctaactactcttctgaaggccttattttggatattacttttgaatgagaaatttaaggacatatctccctgccttctaatagactcttctctcttccccagcttaagaaacttcactgaagttgttggtaatagcactttgaacctaagtctgttttgtttggtttcagaggcacacagggacaaattggcatttgaatgataccagcagcacttcttatcttattttatttattaatatattaatctaaccatgttttatataaaccaaaatttaaagtgatacacattaataaaaacagcaaatgtcttttctggtccttgaattaaaattcataattattgctttagaaaagaaaacctttgttttacttttttttttctttaatctatttttacagtccaaactttatccccctcctggtcccacacctcctacccctctgtctccaagaggatgtccctaccttcacccttataccacccttataccttatactccccaagtccctagggccccaagtctctctaggtggatcttctctgactggatccagacctggcagtcctctgctgtatatgtgttgcctcatatcagtgtatgctgcctgatttgtggctcagtgtctgagagttgctggggatccaggttagttgaggctgctgatgtttctatagggttgcccgactcctcagcttcttccagcttttctctaatttaaccatggggatcaccagcttctgtccattggttgggtgtaaatatctgcatctgagtctttcagttgcttgctggccattcatagggcaatcatgataagaccatgtttgcaagcacaacatagcatcagtaataatgtcaggccttggggcctccctctgagctgcattccaattgggacatgtcactggacctccttttcctcagactcttctccttcctggagttctttcagacagaaacaattctgcgacagagtttttgactgtgggatggcaaccccatccctccatttgatgtcctgtctttttactgaaggtggaatctacaagttccctctccccagtgtaggacatttcatctacggcccctccctttgagtcctgagagtctcttacctcccaggtctctggtacattctagtgggacccccacctcctacctcccgaggttgcctctttccattctttctgttgtccctccgggcttcagtcctgaaccaacattacctgatatgttcttctcttcccctacctgtcacctttcacatccatgtccctccctgttcctgtgattgttttcttccccctcccaagtgggattgacacatcctcactagggcccttcagcttgttaaccttcttgaattctgtggattgtatcttgggaattctatatttttggctaatatccacttattagtgagtacatactatgcataacattttgggtctgagttacctcactcaggacaatattttttagttccatccattttttcctccaaaattcattctggaaatcaatctggaggttccaggttggaaaactggaaatagatctacctgaagatccagctatcttttgggcatatacccaaaagatgccctactatgccacagggacacatgttccactatgttcatagcagcctttttttgtgatagccagaagctggaaaaatccttatgtcccacaacagaagaatgaatacaaaaaatgtggttcatttatacaatggaatactgtttgatttttgaaacaggctcatgtattcaaaccaactcataccttcctatagagtgaagtttgacattgaacttttaatctacttgtttcccagatactagccttattttcttctctaggtatgccttgcttattctggaaagttgtcatttaaggtgaataattaggacctggggcatttgtataacacctataatcctagaagcagaaaacaaatgactgctttaggttaggatctcaggaatacactgtatagataaggagaacctagaaagggaaaagaggcagaaatagagcacagaagagaaaaaggaagagaagagaggggagaagagagaaggggagatggaggggaagagagtgagattcaagattttcaaagagaatgtgaaatatactatttggatttttgcttaaattttttatcacatttgttgctctcaaatctgagtcatataaatttattttactcttcattggttttagagatattgtgatttttcttaaaaagataaaacattctatcttatacagttttccattgtcttctctcttctgatatcaaaataaaatggttaagagagacataagataagaaaagattgcattttaaattttcaggaacacaaaaaacctgttattcttatgaaaagaatggagctttattactctatcaataaccagaacacatttcttggcttctgaaaaaaaatgacatacacactgcttctctccaccaaagtgggaaatgcttgcttttgttagactgtatttgtataagtcactaccatggtagcatagcgctttgtcaagcatgggatttttcttaacacaaacaacttgaagtctctgagctgaattttaatgtgtcttttatatatcaaaacagactgcattgattgatttaaatttgcaagcttttttgttgttattggaggtaatctagagtttaacatgattgaccattcaataacatcacccattctattgtacttgttgttatctctaagacttaagaagatagttgaatcttctgcaaaacagtggaaaattttgattcaatgccaacaaagactcaaacagtaagttatcatgacgaccacacccatggaaaccatgtgtttcctaaagtactcaggtgtctgtagcaacatcccttatgagcgtgttagaaatcttttttttttttaattttttattaggtatttagctcatttacatttccaatgctataccaaaagtcccccatacctacccaccccaactcccctacccacccactccccctttttggccctggcgttaccctgtactggggcatataaattttgcttgtccaatgggcctctctttctagtgatggccgactaggccatcttttgatacatatgcagctagagtcaagagctccggggtactggttagttcataatgttgttccacctatagggttgcagatccctttagctccttgggtactttctctagctcctccattgggagccctgtgatccatccattagctgactgtgagcatccacttctgtgtttgctaggccccggcatagtctcacaagaggcagctacatctgggtcctttcgataaaatcttgctagtgtatgcaatggtgtcagcgtttggatgctgattatggggtggatccctggatatggcagtctctacatggtccatcctttcatctcagctccaaactttgtctctgtaactccttccaagggtgttttgttcccacttctaaggagggacatagtgtccacacttcagtcttcatttttcttgagtttcatgtgtttagcaaattgtatcttatatcttgggtatcctaggttttgggctaatatccacttatcagtgagtacatattgtgtgagttcctttgtgaatgtgttacctcactcaggatgatgccctccaggtccatccatttggctaggaatttcataaattcattctttttaatagctgagtagtactccattgtgtagatgtaccacattttctgtatccattcctctgttgaggggcatctgggttctttccagcttctggctattataaataaggctgcgtgttagaaatcttaatgtgattctggagagatagctcagaagttaatgggtttttcaaaaagacccagatttgaatctcagcatccatatacaggttaacagtactataattccacttccagtgggcctaaccccctcttctggccttcatggacactggatagatatgataaacatatacatgctgcaaaacacactgataaaataaaatggacctaaaacaaacaaacaaacaaacaaacaaaaaggtgggttttttttttgttttgttttaagaatattcacatatgtgaatcccatccctgatctatggaaacaaaatcctcagagtccagaattcctgaaattcctggtggttgagagatattgggtatgagagactagaactaccatatctatctgattctcatgaaggacagcaaattctctcaaatatggatcgatttctccagcctccatcccaacagtttgaacagggcttcaatcctttgctactacatggtaacatttaaactaagctgtccctgcatcagatgtgtttctgatggtagatatcatgtctcccataatcctgtagtccttctaaccatagaaggaaatgatttattaataaatgtgacagcctcctgaaccacagaaagcgctaagcacttattatctcacagaaggtaaagccaactgataacctgcaatccatgaggggctaattgattctttcatcattgttataaaaatccagctcattagctctgtaggtgcaccaataaataatttgtgatctataattgtttatcaaatgctttcatcttttgtgaatcttatttagaatggtattgtgctgtggatggcacgtattgctattaatcaatgagaactaatctttaagaagtacaatttgatgtgacagtgaacaaaaatgataacaggtgactcagctaacattctgatagcatatgtggttatgtggagtccaacaaaatctggtgtcatttgactaattgataaaaaacaaactctgggggaaaaaaaaaaaaactctggctttttaaggctgttagatccaattctttagaaaaattttagccaatcctattaatgtggaataatggggatggaacaaatttgctttatgctcagcagagattgcactgtcagcctcatgtgttagttggtgtcttagtcagggtttctattcctgcacaaacatcataaccaagaagcaagttagggaggaaagggcttattcagcttacaattccatactgctgttcatcaccaaaagaagtcaggcctggaactcaagcaggtcagaaagcaggagctgatgcagaggccatggagggatgttcattactggcttgcttcccctggcttgctcagcctgctctcttataaaaccaagactaccaacccagagatggtcccacccacaaggggcctttcccccttgatcactaattgagaaaattccttacagttggatctcatggaggcatttcctcaactgaagctcctttctctttgataattccagctgtgtcaagctgacacaagaccagccagtacagttggagtggagattatatgctggggtgcagccaaacagatgagtcgagaagcatgacttaaaatgctttgttctttgaacatgctctaatccttgaactttaaatcaacacttctgtattatttttccagctgcagaaagctgttactttattgtttataagtgttgattcatgtcaatcataatacgactagatttgctttggggaatctaaatatcccttatgtctcattccttctggtatatttttgatcctttcttttctaagatgtaaaattgtactccctggattcttcttctgctctcagaaagaactaattaaaaagaaaaaaccctataaattttgtaactattttcatctccctttaatcctttagtagcaatatagttagagtcaacaaaaaacaagctttgactcaggtaagaaaaagccttttttaaacagtttaaaaataatagcagtaatagtagtagcaacgtcaatagtagtattagtagtagtaaattttaggaaagcagacatgagaactgaatgaaagagaaatattgcagtgcatgagactttctgaccatgcaatctccaacttcatagattaggaagggaggatatttccttttatagcaaagggtaaatgagattaaaatctcctcgtgtaagcaagtgagcatactactgaggtggagtaaaagaggtacacagaacaggaagaatactgaagaattttcacaccaatgtgtgtctgttctctgctctgagtctgtgttggctctagtggaaggtattctgaagttcaaggatcttggtgaaggagaatcttaagaattacaagcagatggtaccatgaggtcactagagaatgtgatgacagatgggaactggtaatctataatctgtatctcagacacaggcaaatgagggagcatgctttaatcttactggagtcatatgaggaagactatgttgtactaaggtattttccaacgacataaagaggttggtagtaggttagtttcttagggccattttaaatgatcagtgcttctgatgatcacaaagctaaagtcacttttcaacaacatcatctattccatgcagcttcttggtaactagtagtggtccttcaatgggaagagcagttctatttattgaaacttggagataggagggagaggaaaaaaaggggggggggcaggatcaggtactgaaggggacgggagaaaagtcagaaaatcaaataaaaatatgtagcagtgcgggatgaagagctgggtatagccactggtgagtcccagattacattccaaggaaaagactcccagaccaaaaggggagaatagagaaggggagatagaacttgtagagactgcctccagtagataggcacagctgctagtcaagagatgggccacccatctatttcctagattttaacccagaaatgttcctgttcaaaggaaaaacatagacaaaatctagagcagagtctgaagtaagggccatcctgggaccgaccctgggcatccatcctgtctgcagataccaaagctggttctgttgctgttgccaagagactattgctgacatgaatctggtatggctgtttcatgggaggttatctcagtacctgaccaatgcacatgtggatgcttgaagccaaccattcgactgaacttagggacccaggtgggggagctggcagtagggttggaggagcagagggggattgcaaccccataggaagaacaatgtcagctagccggatcatccagtgttgccagagactagaccaccaaccaaggagggattccatagttgcagatacataggtagcagaggatggccttgtctgacatcaatgggcatagagattcttggtcctgtggaggcctgatgccccagagtaggtggatgctggaagcggtgaggctggagtggatgggtggttcgggaaaataccctcatagagacaaaagggagggtggggagagggcagataggatggggagttgtggtttgataacaaagaggggaatttcatttgagatgtaaatgacaggaatgattaaaaaaaaaaagttggaaaagttgttcctaagatgacaataggaactttcaactccaggctgtgttttttgtttgtttgtttgtttgttttttattttttatgtaaaactagccctagttttactttgatgtcaaaactataacgattaggatgacaaaccgaagactattctatgtaataggtgcttgagacaacgctggattacaaatggttttctagaacaaagtaaatcaatgcctcttttagtcatgtcttcagcaagcatcatagaacaaggaggggtcaaaaagaaaaaaaataggcttctgaagaatctgcttctctgtttcagaagaaaagataattcgatgtttaacttagagcttctgaccagaatttcattaaaaaaaaaaaaaagaaatcatctacttttcaaataaaggtagtaacttaaggctttgctgagacttgaagcatgccctagatcaatgaggattcttctggctaaattcctaaattctagtatgggcttttggaggcttggatagcctattagaccagaggccaaaattttcccttgttggtttgttttgttctattgtttagttcctgtcagcaaattatgctttcacttctgtctttctcttccaaattctaattgcctattttataaggattctttcatggtattattataaatcaatatattttcactttgctcaataactgctctgtagacgttgcaactctagttgggagaatctagattattgtgtctgaagaaatgagcaccacatttggactacagatctgagcaaatgagatcataaagaataacaccacatcattgtacaaattcacactgcactaaagaccctagctaggaaattagaggtaccagattctcattattgatttttgaccaacaacatgttgcatgtacaatacaagcatagctgtgtaagctgaaggttacgatttccagagtaagcaatttcaaagttcaagagatttttgcaataaaaatacctaataagataattttaggaactgtttgattgactgtacaaaatgatgtcaatgcaatggcttctcctttcttaaaaacagtaaattattcagccagacaagagtgaaaattttttaggtatgagttttaggctaggctcctttattttttttctaaagaacaaacatatatctgtttacatttttttaaattaaaggaaagtttaaagatacagaatgatgagtggtgtacatcaagcaccttaagatcaaggtgtcctctctacacatgtcctttgctttgtttttaaaggaggaagtttaattaaagaaaagtttgagttgccccctgggggaagagttgtttttataatgataacagccttttccagtggtaatcttttagacataaagaatgcttctgtttggagcccactggaatttaactgaaatgcatctgtccccagtgggctttctgaggatctacttagggaagaagactgatacaatcttaacagctgacatctggtacaattgccttcgcagatatcttttcaaaatgacttctagagattgttttgtacatactttgttttagaaatgctatttaatcttttcaccttcacatcctttttaaataacctctatttcattgtttatatcaggcaatgtagcatttccattaattgctttctaagtgcatattccaggctaattatcttttctaacaaactatttaaggggagacctggacagtcccttccctgtcttcttttgtgttgtcctagataatcttgtgttttcatgaagcatctacaggcactgctcacagaccaaattgagacgcctctattccatctcccaagagatagaggatgcctgatcctctgaagacataccttcagtcccagcatatgctgcaagattctaaagtcatcagccggaggacggtagtgacatgagcatatttgcttccccccaagttaaatccatagtagttcccttaggatgtattgtttgtataatatgagttacaatatgaaaggagtagctatgtaaagtaacaagccaatgtataaataaaaagatcaaatatattggcataccttgctctggctttattcagttagctattttacttcatgagatctacgctatcctacaagggaggaacccaacacaactgataggaaagaacaactttggtttgagataggattcatttgtcattaccacctgggaacccacatcagaggtaaatctttcaaaatctacagtcaaattggctatagttttgtctcagactgatggatgaattgttcagatttaagcttgtctgttacaaattcttaattttttttcctaaattgtatttcacacattggaaaaatatgtttgaaggctgacaaaaatgacaaatgaagttgctggtagacacgcattgctgtatttatcttggtgcttccatatgttttcatgaatcaattttaatgtcaagatgcatttttttttgagtttgcaaaaattttattttcaaaatgcttactcattaataccttcattatcaccattaagtgtggtcgaaatctattcttagatagcttttattcagcccaaattaactcagagcattctagaacaatgaagaaaactgctaagtaaagatgaataatgtgaaagtgtgtgtgtgtcaagcctcttgttcaagttggtgcctatataataaaaaacattaccgctccctcaaaagcatgatttaattatttgagtatttttagtttaaaagtatgtgtgtatacttgtcaatgagaacagctttgctctaacttgtgaagagccatgtacattatttgttgagaggaggatttttacaggggcaggcagactgaccagacattcccaggaacctcctgttaaattttaacctcctgttaagacagaagtcttaacattggaacttaaaagctagccacccccactcctatttttttctaatgtgagcgttagagctcaaactcagatacacattcttttacagagaccctttactaactgaaatgtctcctagcatctttctttctttctttctttctttctttctttctttctttctttctttctttctttctttctttctttctttctttctttctttcttccttccttccttcctttctttctttctttctttctttctttctttctatgtatagactgtacatgtatatgtattattactgtacagagtttggtcatctagaacttactttgtggtctaggatgaccttgagcccttaataatcttcctgtgtcaacttcttggcactagaatttcaggtataagccaccaaatctgactcattatatgtttctagttttgaaataaaagagtttgtttgtttttcttacccattttacatgtgtagttttatgggagatattcaattagcataagccattaatatatatgtatctggtccctcaaaagggtcctcttaagtgaactaagtcatacattttatatagattatgaagcattcaaatttaagtcaaagatctgaaacatttgaagctaataatggaagaataattttattcgctcccaactacatcatataggtaattccaactggatttacttgcaagctgttggtaaatgttataggtagattaaaatatgggactccagaaactgaactaatttgatagctactaagtagggaagtgggaggaaaaagaacattgacagtcaggagccataacactataccatgtctaagaaatgatggttgaaaggaaacctatttcctttaattccttgtctcttcattaagattccaagtttgaataactactgtcagaaatataacgtttatttacaaagatgtaaagatgcttctgtcagttgaattgctttattttaggcagtgctgtactttttgttatgctgcttgatattctgttgagaacttcatatctacacccatatctatgactgcaggtgtcactgagtgctaccttgtctcttatcaaaatatctaataaggacagagttgacactctgattacttacctcaaaatatacctgttaccctttgctcatattttgttatgttctaggttcatattaggacctcacctccagaaccccaatgttcccacatatctaaaactttatctccagtgcttcgtgtagcagtggggggaaaaaagctagctcctcattatctctgattattcaagctgtattctcccatgaaaacaaacttcctcaaatcaagtgtaggaaaaaaatctttactatatatctactgcgatgatcagtaactgggacataaataacaaacattgtaaatgttgtgtgaataatctgcagaatggatagattcatatacatagatgaatatgtggatttatgtgcctgaagatgcataggtggacagtctataccaattagcagtgactttttaggtttcattaaaggttagcaattgtaaaccctacaaagactcttgggactggatctgtttctgatgaaaacttgtcagaattttaactacaatgcttctaaacttttatataaaaatgttttatgtcttgagttttaagaggcactgaacatatctggatgtattaggtttctttagaggaatatgcctgtgagaatgaacttgctacaaaggggatttattagattgacttacatagtgcatggtatataaccaaataatgattgtcaatataatacagaacctatgaacatggtagttgcctaatacataaaactggatggctcagaagtcacaatgtgataatgaaggttggaggatacctggtatttctaattcttcagtcatgttagaaatccaaataattaggttcatatattagcagaagatggcagcaactctgatatccatagactagatacactcacaagcaagaggtgaagttgaacaggcaaaagatgataatttttcttgatttcccttttttatagatcactgcatgaacatgcaatgccctccgaggaaggcttttctcccactcagttagtgttaccaagaaacagccatagagtctcaatcagaagcatttcccttctctgattcgatgtttaatcaagttgaccaacaaatttaactaccatgccagtgcatgttgatatagcagaagaagcaattaacggaaggaagacacactcatttctgttgataatctacttcttttgtctctgttagatttctattactgcgataaagaccacgactaaaagcaacttgggggacaaagtgtatatttcagcttgcaagatacagtccttcatcaaaccaagtcagggcagtaatttaatcaggcaatactggaacaatacttactggattgcttctcctggcttggtgggtttgcttttttaaacaccctaggattacctacccagggttggctccacctatggttgtacttccacatcaaccatcaattttctcagctgaatttcccccttttcagatgactctagcttgcgtcaagttgactaaaactacaagataggctctgcctatgggttttaataaataatcttaccttttccttttcactaaatagcattgcattttattctaatttcatgtataacacttgtctaaatttaacctacatagatcaataccacagtggcaatgggattgaaattaagatttacaaaagtcatgtgataccaagatgctcaaattcttgtgctccctaaattaattaaacacattaaataggtaaataagatgcatcttttcctttgtttttcatattgcctctaaatgtcggactctgaattttggttttctttttgtagtacttatgtgacactacaatcaaaaggaaattgttgatttaggaagaagtagaattccccaataatttacaaaatcagaaagaaaattagcacattagaagaaaagcaaattttcattatcacagataaggaaaaagagaaacatattctttatagtcatgtgtttatctcagtgaaatagacataatattagattcaggtggttttgtgtgtgaatgtgtgtgtgtgtgtttgtgtgtgtgtgtgtatgtgtgtgtgtgtgtgtgtatgtgtgtgtgtgtgtgtgtgtgtgtgtgtgtgtgtatgagagaggaggagagagagagagagagagagagagagagagagagagaaagagagattgtatttgtgtatatatatgcgtgcatatgtattgttgttggtgtgtttaaatcagacatatttccatgttatatctaaatgagtcattagctcatagattttcaaatgacataactttatttttaaattctcaattctccaattataatgtacacattactaaaatgaatgggaaaagttgtcattttttcattttaattttgcttttattgtttgcatagaggcccttttcgtcattaccaatctattgtttaaattttaactaatgcaaatataatgataaatcgttacttgtacttcctcagaatattttctttttaacatagattttttttttgcagatatagtttctgtactatgaaaactgacactgattttagtgacgaatgcctttcctagaagaggccaaaatgcctagaatttaagcagtcagagactagagagaggaattttccaagttttaggtaatccttggctacatagcaaggaagggaggataagagagtgaagataaagggaggaaaaaggaacagaggaggcaagatgagaagaaaaaaggaagaaaagaaagttgggtgaggaatacaataggaaaagttctatagctcagagctttcagagagagatgccatcaccttggctctgcatttctaacctctcaagttacaagatagtctttgtttaaaccatcaatttttttgatacaatgtggaaataatccaggaatctagtgtaatagcctccctcgttcatgcttttattacctgcactttcagtgtctagtgttcaactgcacttttacaatatccattgcaaaacttccagaaataagcatttcatgagtactaaatccaacatcatccatttcagcaaacaagttcattgaaagtgagtgctgctccactctttgtccggctcaagacttgagtcatccatgctctaaataccaccacccatgagttggttagcaagctccttgttttggatcaagtttaagctattacagatgaagtgatccttctatagacacatttaaggacccataattcacctacgaatgataccacaaactcaaatagtatgtgaaagcaaatggtgtgttatcctccagaggttcagcatgttggggtcccacattctaagatgaagatgtccaagtgagctcacaggccacattaggggaatttctggaagagataggtgaggtctattattgactctatctctaggaacattccagaaccattggggaagtctggaaactggtgctgaggaattctggaaactgctgctgacccattgtcattgccttagattacccaggtatcaaggcagcttctgaggcctggacttgcttggatttgcccagttcttggaaacagatatttaagcctaatctcctaaactgacaaattgaagcctgtcacgtagtcaacctgtctcaaaattttgtttgcctatattcccatctcattttctccccatcttatatgcattatgtcattgcacactacgaggagaaaagggatgattttttaatgccttatttcaagagggaaatattgcatgtagataaccacaattatgaaaaattcttttaagtgttctatttgttatcagatattatagttgtttacttcaccagatttataaattcagtatgttatcagtagtatggacgcataggataaaattttatatatatatatatatgcaacttagcaccacttgttaagttattcttgagggttttatatcatccttataggaaaatagtgagtacagtgtacttattttaggataaaataccttgtaattttgttgacaatccaaggaagagattcataggacagttaccctgatggacacttctagaacacaattagaactaaaagaacttcttatgattttgaaggtgctttcgattattggtcccttaactatttcttttccttttgagaaatctgttttctttaggctgtacatcacttagagttatctatggactttgaaaaagtggtgttttggtgtatgcaagagtccaagtataaaaataaatttgtaactgtcattgagatgtccttaacctccaaaaactttcacatcttttagctctggccacatttaagagattaacaccaaatggacattatcttcacgtgtgtttagtctctctctctctctctctctctctctctctnnnnnnnnnnnnnnnnnnnnnnnnnnnnnnnnnnnnnnnnnnnnnnnnnnnnnnnnnnnnnnnnnnnnnnnnnnnnnnnnnnnnnnnnnnnnnnnnnnnnnnnnnnnnnnnnnnnnnnnnnnnnnnnnnnnnnnnnnnnnnnnnnnnnnnnnnnnnnnnnnnnnnnnnnnnagagagagagagagagagataataggtatataaaatccattttatttcccagatacataatagaaaaacaaaatcttttcattttctgaaagaggtcattatgttgagtttgagatcatacattaggtatcttctaattgatatgctctttggattgcacaccgaaagtcaagcaccttttacgttaaaataaatcatctgtatcctcattactattccaggaactaacaatgtgcagtgatttgcatcatgcttctatcacattgtcctattcagtagtgattaatagagtaattacttaataaaaggagattaattcaatttatgtaaattgagccactttgtttaaaaataacaaaatacattttatttcactgtgatcatgaaattaaaacacagtcttggttgaaaatttgaatcaaataaataataaaggaaataaaccacccacacttgatccacttttatattttaatttccattatttttccattaagctttaatagttgtgcttaagcaataattgtgatttgttagcttcctgtttccactttccactataatggttttttatatcatagagaatgtgctccaaagcaccattgtatgtataatgtttttgtatagtgcgtaaagtttacccttatgttattcaaatgctgatttttctgtcctcatatcttgtttcaattgagacatgctttgcaatgcttataccaagaatctcctgtctcaagtttgtgtaaacagttcttactatttattctctgacttgtcaataaatgatgagcacccaatggctgagcagagaaggaagaacagtctggaatgtctgccagcaaaacgacagagagggagcagagacagattcagatcagtgaggatgatggaggaatcagagccatgaggaaggagtccagagagacatctggaatcgcacatgaagcccaaagatactgatcaataacaatatgcaactactatgggatggagctgggaggtagccaacttagcatagaagggtaaggttaactgctcagctattgaggtgtagcttgaaatgaatcttagtttctttgtgtgtttattggggaccagcataaggtaaagaaatacagctgccagattaattcactgcttacatttttattaaagacaaacaatttacacatcatcttagatggctgcacactattcctttatagaacatatattaacatatataagtttttacattttacactgtaaaaccacctccttttaaaagacttgaaacaaagcttttagaacccccatatatgttagtagcactgagttcaattatattgtaaggtagctaatgtttaagcttcctctgattattggtattattatatttaagtctgacatctattcttttcttcctcaaacctcgccatccagaagaacttatgtgaatatggaattataacaccagtcattttcatctttgtcctgctaggctctgtggaagatatccaacataatcagaaataatacctatattctgaacagtgataagaaatcatatgaagtgaaactttaattcaaaggaaaaaattatcatgcagacacatgcatatacattgccattctattacattataaatgggcatatagtttgttatgggtcatcagtgaactatatatggaaaatgtagaattcgtgttcttacttaacattgatacatttaaaacacctctcacattggcaaaagtacaaacccatagttaaaaatgacttaggatatgtgatatattttaaagattgaaggtacacttaatatttgctatattgcttctccattgttgacggtttgtatcatttcaataagcataattttaattatcaatgaaaagtaaaaagcattctataatcaggtttttcaaaagaagtgaacataatgaaaggattttaactccatattttttttggggggggatattttgaagatgatgaaaaagctggggaaggaagcaagcttccctggaaggatcagtgtccaccaaggtcatccctatgtacttacctaggacttccccctgcctggtattcaccaagtcttaaggtggcaaactattgagcccccaatgaagccttggtattgcaagtacatgccacaccacacaacattgcccttgttttctgaagattgtacatgggctccatgtttacagagcaatcacctaacaagctaagctaacacttcagcccttaaagtgtcttgatcttttagaacgtggtacctgaaacttgtttgctaggaagacttggatggagtgattggggatgactctcttgcagctgagtcatgtgctcctatctaaatgttggtgttagttgcatattgagtgaaaaggtaagaatccatgatatctgagatgtcattcatgagctcagtgaactagttaactacaatatatggaccattcagggagttaagtaaatgcctaggatagaaactcaaaatcaattcagtgactggcagcatcaaaaagatggaccttcaaaattaaaaaaaaaatacaataaacataatgagttgacaacattgtgttctaagataaaaactacaaagaaaaatggtgaataaaaaaagatgaagccatagctggaaaacctacctggattttgacctgaaataatatatcatttatgaattacaatcatacacttctaagcactaagtaggtatatctgttaggaatgtatgtcagtcacataagcaaacttgtaacaaaccaactgtgcaaggttcagtgttgggaatctaaagtatgtcacatttgttagtatttatacctgtctcatcatcaaacctgtttctgtcaaacagaagctttctctaagaagtactatctgagaggcagggaggcattcagtgatgaagaacactgttgtcctacttcaattcccagcatccacatggtcgcttaaaaccaaccctaaatccagttctgaggacacctgaagcactcttctgctttccttaggcattaagtacacacattgtacacatacatagaaacagacaaaaacttgcataacaaaataaattaatccttaaaaattcataggtattaaagaagtaatttctcttgctttgaaaacttcttgcacacctaccaagcacaaacactttgaccctctttaataatgcatttatctgtgtgccattagtttacacaatctgtgaataataataaacagtgtttgattaaagcattctaattaatccaagggggcttatgcataatgcataattattacagagctagattcaatcatttaagtttggcaaatacgcatatttagatctactaaagaaaagttatttgtcagtagaatccttctttaattttctcagcttacataccaaggaacagacttcatctgtggtgactaactttgtccataaatttcaaattcaaaagcaatataaggagtgtatttactgtctctgcttcctggtcagcatgataagagctgctgagttctgtatgcccttgaaccatgatgctctgagacattctgaatcaaatacctgagaaattgaagttctttgaagtattagtctcatcaatgaaagaatttataaatggacttaaatggaagcttgagaaccatttaattattttgggaaaaacaggacaggcaagcataaatcttggtaaaagaagcagttttaggcaaggaacaattgcacactctctgtgaggtccttactctaaaaatagggaatacagactaaatccaattctaataaaactacaacacaaaacaaatgatcacaccaggcaggctgtccagattctggggccatatgcctcttctgcaatactgttcctccctttgatatggggctctttatgctctgacagtataagtaaaattatgtaaatctttgtttgattcaaagatcacagttacattttccttaggtatcaaaagacatggtaaaactatgaaagtctgacttagatgaacacgatcctaagtttaactctaggcattgttaagaaaaacatcaaacaactgtcttttctattaatattatatatattttctatgttgtcataagattgtattatgtgtcttcactcattgttttatatgtcttgaacccgagctgatagatgttttctcatttagtgtcatataaaacttgtaatttctaatattgctgttgtcatgagaggaaatagaaccagacagttaaagtataccattaaacagtttactcttgatatcaatttattatgtttcccctcttttatagttgatgccttagttagggtgaagaccacatacagtatgtatggagaacttgtagatatctcagtggtagaaacacttgctcccaaatctgagtacctgatctctatcccatataatctcttcttgaaaggtgaaaatcaactcccatcacgtacataccatgacatatatatgccttcatccacaaaagcatatccactatccatatgaaaaataactagtagaactataaagtatgcatatggagttgcattattcttgactaattataattactgaagaaatatactatcatgaatttatagaatataacattagacttaccatcagcaccaggaaatagcaacaaaacaaaacaacaaacaaaaccagtctggaacctaattattgaattatttttcatacattcctcatccactcattacttatgaaaattaatctcttttacaagtagatattagtaagcaaaagaaaaaataaagcagtatgaattaggactaagcatttgaagacaaatatccacactcccactctaaagttttaaatagatatctggtcacttctacaaggcataattgttcaggtgaaacaaaaccttgaaacatagtctcaaaataaaaatggaaattaataacatagtgtgatatctaccaataaaaatcatttataggaactaacccaacagcaagtataattaaaatgttttccttcatcatgttcacatcctaatttctattcaaattgctccatttataagaggaaatccaaagtagcatcttgtattggccacatcccttagtcactttgctgaatgaaaagctcactgcccaaaacaaaattttgttaatttttcacaatatgatgattgggtaaatgattttgataatggttttcttactgacttagaacacaaaccaccgatatatttatttatctatctatctatctatctgtctatctatctctctatctatctatctatctatctatctatctatctatctatctatctatctatctatctatctatctggctaggataactaaatagctctctgccctcctttctttttccatcccaatatgattttgactttagagaaaatagttttagtcagccactaacagcactcgtgtaactagtaatcttctatttgttccttgtttgtcaaagattactgggtaaaaggccagttacacactggaaacctcgcctcagtccagagatatctacacaagactgacatctgagcatgtggttctttgggaatctcagcacagcaatgtgctattgactgcccttggcccctatcgattcttccctctcccacatggaaaatatgttgacttctagatttcacaagtctcatccaatcacggcatcaagtttgatgtctataaccttagaatcaccttaaggttcggatgtagaggatgcttctctttgcaagtctttctgttctaatgtcttgtaagctattaaaactatttggtgctttctaccataactattgcttcagctttgcaaaatcattcttcactttgtttatatcctgagatataaactagtcaagttgagattcatttattttgaggggtgtgtagggaatgaatatcttaaactgtgtaagtattttatttattttatatttttctcttaggtcacaattttctgctttatttttgagcttttacatatgcagctcacattgtgccagtgacatttatatttttatttattctttgaaaattatacaagtatcttcataacatttaccaccacatcccctttccacactaatctctctctctctctcttaacatagtgtctcattattttttaactcagtgaattgcattaatgctgcctgtgtgcttttgagtttggagccatccaacaaggcatgggcaacctactagtgactactaccctaaaatttgtttgagtaagggtctcactgtataagcctgtgtaactcgaaattcactatgtagaatgtactagcattcacagtgattcacctgtctctgctttgggcctgggatttctgatgtgtttcagtaaatccaagtcaatgctggaattattaagtgactcagccttgtgtgtgtaaccactgatgctgatgtttccggaccctcctccctgtcactgggctctcacattcttcccatcttgtctttatcagtgtgctccaaaccttagcctaccaggggaagattgatataaatgttagatgcatagctgataacactcactcatttactgtcagcattttaaacaggtatgaatctctgctttagtcactactcactggaaaactttaatttttatgaagtaattgtaggtgggcatataaaatggtgtttcccctttcattgatgatcacatacaaacactccagtggttcaaagattccatcaggttatctgcatacagcttcaaactatccaaatatccagaaaatatcactttcttacatgcctatgggcagtgctcctcctcacataagccttggggctcttacactccaacctgttgaccttgtttgctaatttactgcatcctgaatttatatgtattttttttcttaagaatccatagaaagaaaatgcattctgatctatgaagatggtagacgataaagccatgaatatctccagcatttatttcatagaatttccaaaagctgtcaagttaagtgaaaagattaatgaagagaggaagtactaattgaatttttaacacaaaaataatgttttaactcataaatagtcaatgacagagcaaatatcatccatgttaatgaccaactctctgtgattttagaaagaaaatggtagtttttaaattctacaaaggaatctgattgagagtttaggaaatttcatttctgaattaaagagcacaattcttgttaagatactggttttgttagtaagtactgaagattggaaaaaaaaaacaatgttatgtttccttctataaaaaaaaaaaacttataataaaatgggattttgagttgaaagaggtgaaagaattctctctctttaattctacctaccagagagaggtaggtagaaaatattgttttcattttagtttttatttactttaaatatttaagatattatatatatatatgactgttttgtctgaaagttcattagtgtgccatgtccataccaagtatcagtattggccagaaaaggtcaaacttgtcagatcccgttgactggctacagatggttgtgagtacctatgtaggtgctggaacacaagctcatgttctctgtaaaaacaacatgtgattacatgatttttatggctgagctacctctctatgctgtctttctataagtattttagtttcacaaaatataattatattgttctcaccttccctttactgcatctaagaccttccatttcccttacctccaactcatcccttaatctcagactccctaccaaatcaatggcctattattctttgattattcttattacttgtgtgtgtgtgtgtgtgtgtttgtgtgtgtgtgtgtgtctgtatgtgttagagacaaccgctgagtctctcttttctttctttctttctttctttctttctttctttctttctttctttctttctttctttctttctttctttctttcttgtttttttgagacagggtttctctgtatagctctggctgtcctggaactcactctgtagaccaggctggcctcaaacttagaaatctgccttcctctgcctcccaagtgctgggattaaaggcatgagccaccactgccgggatgagtctctatatttaaatatgtattccacattgtcatcattcctagtcaatgtactatgtagctaaacaagaactgaatttttttctccctagatacaacttcctactcattaatcagattttcagcatcattctttaccttgtaaattcctgggtctttggtaatcacaatttattttatagtcaagctctatgaaatcagattagattccatgcattggtgatatcatgcagtgcttttctctctatgccttgcacagttccatctatcttgttctaaatgacagaatattctccctcatgtaccctacctcatccattcattgcttgacaaacttacttgtttctgtgttgtggctgtagtgaatgctactgtaattacagggagtgtatgtgtcactttgatatcctaatttcaccctattgcatatactgatgtgtgagattgctagattatatccagttccatttttaatttattgaaaaacctccatgttacttctgattatgcctactaatttaattcccacccactgtggatgagagtctcattttttcatatcttcagaagcacctttttaaaaaatatgtcacaaatatttaatatcataggtattttttatgtcatagacactgaagtcacaccttgtatagttttgattctcattgccctgatggtttgtaattttggtatgtttaatatgtttagccattgtttgccttcttctgagaattatctactcagatgatttgtgatcatttttaaataagatgctgagtaattttattgatataaacattttaacataatatatggaaagattattattcaagattagcaaaaacttctgcagatggctgaaaatttgagtgaactttggaagctaagaattactagctttatcatatattccagtgaggtcaggagtgtagtcagtgataggatttgcagaaccccaatttgaaactaagtctgggaacctcatgtaaatctagacttgcttggcagcaagacacaatgactctgagtacaaaattgactctccttgaagaaacttgaagacaaactatatactctaacattttgtggaaatttacaattgtcttaaaacattttttgagggtatacatgtctcttgatatttcagtgtatcttaggttgtctgttaactattttgtcattttttgatatccacagtttcctgattttgtgctgttttgttgaataaacaattaaggaatcccatgaagaaaagtacatcttaaataatagcaataaaattattaatatgattaaacctttttctcaccatgaaggtgacaattaaaagttttaaaaatatttgtgaatgttcatgtttgtatactgtattcattatgtgtcgtctgtgtgtccaattttatgtataattatgaatatttatttgcctctgtgtgtgtgtgtgggggggtaaatgtgaatcatggccttcttcccttttttgaggcagaatctaggttctttgttggttctaaggagtggaaatcatggccttgtgcttaaatgccaaatgctgacccagtgagctatacacagcacactagtaagtttttttttatctcagggtctttttgttgtttttttcttcaatcatcaaacttttatttcatagtaaacagatggatacattacagggagtttccaaaataaatacctgctttagtttatataataattctaattagctgaaaacctcaaagcatcattcattttcaatagaatagtaagcacaatggaacagaacagactatgcctaaaagagagttggaagaagattgtgtgcctagagtttcaccttttccagaatcatttctaccattggcagcaggtacaaaaaaaaatcatcccagcacggtgacgtatgtctctaatcccaacattcatgagggaatggacaagagatctttgtgaatgtgacaccagcctggctgcaaacatagttaactgcaaagggcctcatatagtaagaccttgtcaataataataacaacaataataataatgataatagtaataataataataacaccgagactcttgcagctagctttaacagatcctgtagaatataacaagacctaatcagtgtattgttctccactccatattgaggtgttgaactgttcccgggggcaaaggctagatgtgtcctatgtgtgtctgctgagttttcagatattttccggatgcaccatttctctgcttccctcgggtcacacccagaatttgggacttttacttttacatctccatttctccccatgtccaatataattttccaagttggaagggtgcatttcagctgtgccactaattttattttcttctgccttttcatcttcttgaagccactcttggggaatgttagaaatttcatgtttgtgtaaagtgagtgaatgaaagcattcattgcttttgttgaagctgcttccactttcacactcaagaaaatgcccccttgaatcatggaatgttttccaccagagctcattggctgactacctgtgcacttcttatctgtgttgacaatagttgttctttgattctggtaccgtttgtttctttatcatcttattttgtttaaattatttgttttcttttttattatatattttctttatttacattcaagtgttatcccctttcctggtttctcctcctaaaactccctatcccctccctgcttcccctgctcaccaacccacccactcccgctccctggccttggcattcccctatactgggacatagagccttcacaggaccaagggcctctcctgccactgatgaacaactaggccatcctttgctacatatgcaaatggagccatgaatcccaccatgtgtattctttcattggtggtttattccttgggaactttggggttactggttagaaaaaaaaaagaagaagaaaagaaaaaaaaaccattatcttgcaatgaatcctctctaggcaaatcattcagatcattctgataggactgaatttaaaaaatagattaaataaattcctattaccagcatacatctaatgtgttcacttcatagatctctcaatataatagcttcctgggtagaattatacagtgtttgaaggaataaaagacagttttaaatcagataaataccatgaaaaggaagcacgcaaaattctttttttatttaatttttacactccatattccattccctgccccctcccatccaccctcctactgcttcacatcccacacctccttcccaggcccctgtctccacatggatgctcccacctcaactgcacctgacctctaaactccctggagcctccagtctcttgacagttaggtgtattatctctgaatgaacacagacccagaattcatctactgtatgtgtgttgggggcctcatatcagctggtgtatgctgtctgtttggtggtctaatgtttgagaaatctcagggatccagattaattgagactgctggtcctcctataggatctcccttctcctcagcttctttcagcctttcctaattcaaccatagtggtcagctgcttctgtccattggttgggtgcaaatatctgcatctgactctttcagcagcttgttggatgtttcagagggtagtcatggtagtgagcgctacatagcctcagtaataatgtcagggcttgggacctccccttgagctggatcccattttgggcctgtctctggactttctttttctcaggctcttctccatttccatccctgtaattctttcagacaggaccaattatgggtcagaggagtgactgtggtatggcaaccccatccttcacttgatgtcctgtgttcctagaggtggaatctgtaagtgccctttgtgtactgtaaggcatttcttctaagatccctccatttgagtcttgagcgactaacacctcccaggtctctgttgcattctagagggtccccccaaccccctatatccagaggttacctatttccacttttttgctggtcttcagggcttcagtccttttccctcgcccaataacagatcagattcccccaactctcctcacccttgtctacttttcctcccaggtcaacaggacatgcatcgtatatactcactaataagtggatattagccaaaaaaaaaaagtacagaatatccaagatatgatccacagaactcagaatgatcaacaatctgaagagcccaagtgaggatgcctcagtcccacttgggagagagaagaaagcaatcacaagtggggagggaggaaaggaatagctatcctttttaattctttactttttaagtgatattttgattatttgagtttcatgcaatgtagtctgcatattaccactctcccaagatcctcctgtaatgactctccacacattccgcctcttcattattctcctcaatattttctctcttttttttttgtctttttgctttgttttgttttctgaaataagtccagtgtgggcttacctgctagttttgaagtggggcctgccctaacatgtggcttccctactagaggttccatcatttaaagaaaactggctccacatctcccagctgttatcaaggaccaacagcttcccagcaagtggtgggcttttatgcagtcatgtaggtacttccaaacattgacccaggaggaaagaaatgagaactgaatacctaagtttgtctcttcacctccatcgttcactgcaggccgtggagtccatttaaaaccgtacctactgatcagccatctgaagtacagaatgacatagagaatagggagtaaaggtaaccagcagacttctcagtacttaccactatacctgggatgtattagatatttgttgaataacagcatgggtagactggtaagtaattgtaaagaaaactgtttattttttcatgttaaatgaacattaattctttatttttggcagttcactttctcctatcactcccagctagaaacatttatgattatagaagtcttgtgaggtggtggtggactttcttcaaatataaaggctctaaggataaatatgtattagtaactttctatatataatgtggttcggcaatgtgatagtctgggatatctgtaaactagaggataatttgtgccattcattgtactctttgttgtatcattcaaggtgaacagagcctcatcagcctcacaggacaggatccacccaaaactgacagttccctaatttctggtgattttgtgctctggactccattactctcctgttctttctgtcaatttatttatatcctttagataaagtcattttctgcttcagttagccccattcattttcactgtttgcattatgggaaagcaccttgtgtttatcccaaagacttagagatatgagttcagaatttgctctttaaaccttagataaaaggatactgatggcagtttgaaggtagaagtttgcatataatcttgtatttgccttttttttttttcatagttaacattcaaaacccaaggttgaagattagaataacgtctttttacctaattattcaataatcacaatttcaatagttgagatatgttcaatatgatttttttctaaaatgggtgagttcgtttttaacttctaccaggaatctactaagaaacctttctggaaaactcccattcataatccggaattcatcctcttactcataggaaacataaattttagctgtaaacttacatttgcttgtttttaacattgtctcgatttgcagtccaggctgactttaaattcacgcttaaacttgatagctccttgcatctgcctctgttgaaattacatgcatgtactactacattcaggtgatatggtacatttaaaagtatattctgtcctaataacttgataatttagaaaagcctgttcatggcgtgaccaggaaagtctttagcacagtattaagatgaaaatcaggactgaagagacggttcagtggggaagagcatttactgctcttccagacatcctgaattcagtttccagcacccacatggtagctcacgagcatttatatattccaggcctagggaattcacacccttctctggcctcagtgggctcctgcacaaatgcagtagagatctatagacacatacaagccaaggtcatgaacatgtgtgcaggtgcgcacgtgcagatgcatgcaagcacacacacaccttttacaataacaaaacaacatagaacagcaaatgttttccttcagttacatttttggggcaaatttgcttaactaatgtgatgataaaccatcttgctcaaaaacaacacaaagtgttttgtgtcttttgtgttcttttccagaaaccattaaatctatcttagagtggctttgccattcattcgctattgagactaggatagataattgttcaagccctatgttttattataggttcttttctacaagacagagatagctgtagtggtcaccttagaaaagtggctgtagctcgctctgtagagagaactccctataaaggaggacttaaatgatttgatatgcagtgcagccaacgatatgcctgacatttaaagaataattgataaatacctggctaaaagataaaacaataccatcagcaagtagctaaataataattattataattatataatgaagttcataataataaatattagtaacagtagtagtactaataaacaatacagaaattctgtgaaataaaatggaaaatgacatggaaaacaaagaagagtgagagtcaaataaaatgtttcagcaggtttgctaactggtatactttccttaagatgatcatttctcatattggctgtgccttttacaaagcctcttaaattaaaaaaaaaaaaaagcaagaacaaaaagaaagaaaggcagacagccaaacagacaagcattctaaggaaggacacatttattggatgaatatagatgagatgggtttcttttcgatgactgtaaacagagtgaggcaacgagccacacccttaacaatgccattacactgaatgatgagtttcactctttgtttacttacttacttatttacttattttttagcgaacttcagtctaggtcaatggcatcactatgcagtttgcttcctcaataggacagctttctgctatattacaagtggggaggttgaagatgtggcagaaaagtggtggtggtggtgggggtattaggtggaaataagaaagttaacttgcattttcagaagatgaaggaactgtttccaggctccggaaagtatgtatggtacatggggaaattaatgtatatgtttagagaataaataaattaagtcccacaatagcaaatgtagggcatacagggatacatgtaaagtggcaaatggagaagggagaagatagtgacaaagtctaaataaagaacacgttcaggtctgaacacttggcttttgtgggaaagcactaagacagtaactgcgctgccgtctttgactcttgttcccacagttccggtttcagaatcaagggatggggtttttggatgcttagagttcaatctgtagcttcttggatgtctgacaactttgagatgggaaggagttgaggaagctgtcaaaataaattgccctcataaggcaaaagagtcaagctctgcattcttttccatgctgggagggaaagtctgtagtcagctcaaatgtagccctgtgcttcggcagccccctgcatgggggagatatattggccaagggtgaatactcaagggcacaggtttgggatccttatgcacttcttaaattttggggggttttgtttttcttcaagtaagtcagttttctgtccctaggacaaggttttaggatttgaacgttcatgactagtaaaggaatgaactatgttagtgggagggatttttcacaatagtgtcttacttagtttcaagccctatctctagaacagtcacctctaatgtaacaggattatttttcaacatgtaaggtgaggctgtcatcaatgcctttcattctttaagttttaattctcttcccattgcaatatttctcaaaagcaacatactattactttcaggatttagtgacttataatttccttctttagtattattttttattgttaaagaatttcatacatacatgtagtgtctttcaatcagtttagcatcttttgcctgtcctctaatcccctgtctacccacaccactgctttttcctgccaactccctgggctcttgttcattgctttgtttttattcttccctcatacattacatcccaagcagtttcctctccctccactcttcccagttacccaccctaccccttctcccaatctacttcttccccctccttcatttcccttcaaaaaagattaggcctaccaaggctctcaacccaagacagcataagaagatacaataagactacacacaaactctcacatcaaggcttggcaaggcaatgcagttggggtaagagggtcccaagcacaggtcaaagagtaagacacaccttcactcccaccattaggagtctcacaaaacagtaagctaacaacggttacatatatgcagagaacccagtacagcctcaggcatctcagtgatggcctcttcagtctctgtgagccttaaagagcactgcttagttggttctgtggacattgttctcctggtatcctctacagctctgccccatacaattctacctccccttcttctgctggcatttctggagttctgggtaaagggacacaacagagatctccaatttgggagctctctgcctaatgtttgtcaataatataattcttatcacagtttcttttctcctctccatctacttttctaaatttatgtgaattttaatggatctgtctctgtcttaggggcatccactgatcactgtttattcattgaaaatagattaattcattgttatgtaaataaacatgaatatatatgtcagcagttgctgtactattgttaaagaggacaagattttttttatgtcttctctctgccctctagcaactaatcatttcacatttaaacccccagcacattttaaaacatgcagaaaatctcctttgtgagttgcagagtgactttcaggaatgctctctgcctgtggtacagtttagacaaaaccattatccccccaaaccgttcggtaatgacagaacacatgccgtgtaatgtaaactcacagcccggtgctgggcaggcatgattaggctgtcatcttccccaacagcagccacaggaggagaatacaaaagtaaaattatcttatttattacaggccttttgtaggggatctggcactcttatgcaattgacatttttgtttgtgttgctgaaccataagttgagagctaatttaaattagttaattcacagtctacaaaaatactgttaataaaatgaagtcacctttatgttcactacttcagtgtgttttgccaaaaatatgaatcattaattttaaattttgattatggttttatatattgtttgcaaaattaaaattagaatatgtctgaatctaaaaggaagctgacacttcagaatatttacttgttctctacagttaatctttgtatattttatctgaacatacactaattctatgtaatcatacataaacatgaacaaatatgtatacatgtcaaacatgtatttttgcacatggtggtttttggcttttcatatatcttagaggaaattttaatatccagtgagaaatcaaaatcaccaagttcttgaaagtttcctggctttaaatgttatttgaattaaaaataattctatctctatgccttccttcctggatgtgatcattaaagaagatatatgtatccagacagtgtgggaacatgggacaaactgaaatgacagagggcttcctgtcattcctaagagaaccagaagagtggtcacaacatttcaaggatacaaaaatcggacttgttctttggcttgctcaaagccattactccaaatctcctgatttaattatgggatgctacgaaggagtgacagggaaaatttctgaagaactgcagccttcatacagaaagcccagacatctctgcccatctgacagacagaggaaggcactccccagctccttcagctcttagtcttcctgtttcatactgtcaaagagatgctgtctcctgtcagagtgctggctctccaggagatgctcagattagaaactgtccagaaagatttaacatgttttctgccattggacaatggggggctgggatgtgagtattttacttcactgcatgcaattggcatcttgaagcattagtttgtcaaaatattgacaggtcctggatgttggcattgtgggttcattttcttcccaaatggttaattcatgaaattaaccttctctgaatgtctgcttgcattttgaagggttatcaggtacagatgagtggagtaaacaaataatttcattatgtctaacatactttcttctcatctctcatttttttccttttagatagactttggtagccttggctttctattaggaatactgtatttgagacctgatgagattgtaataaattctcttatttctcttgcatattctgggaagtgtctttagctaaaacatttttttttctggaagatgcataaaaggatattgataagaaatgtttgtaccaatacagattttatacatcaaaaaacatgtaagatttttttgtggggtgcatttctatatccaggttttatctgtgttccagaaaataaacggctgcaagttccctgagccccagcaatgtcatgccaacttttcaaaataaagggcaatatgaaaagagggattactaaggaaatattctgtaggttttggattgatgatttgattgattatatagcaaaaaatcttagaagccttaggaccaagcaatgtggagtttcattagtttttttttttttttttttaatctgtttttgtctctggtggtctgtgaaatctcctctgatgactttctcactcagtgactatacctattaggataatttcttccaattcataattatagaaattgctttgtctgtgattgtttgaaatctttgcaaagaacagaaaaaataagggcatgaaaacagtcttttggaatcaagagccatcagttactattttcttctgagtctcaatctatctctcccccctcccccgcacaattacttagtaattaaaaagattaaaacaaaacaaaacaaaacaaaacagctaagtatctgaaagtcctattcctctcctatgttggcgaatgagtcaagttgggaaggaagagctaagaaatatgacaagtaagttgagaaaactcaacgattttttgctatctccccattatcaaatgaaaaggatattattttgttttcaagagagatgcatcctcatgtagagcaggccttctttgaacatctatgtagcccagggaagattaccttaaattcttgactcttctgttccttcttatcaaatgtttgattaaacatgtgtgatattatgcctgccaaaaaagaacatttcctatctcaaaattagcatgattaagagggacatccacgtggagacagggggtggggaggaggtatgggatgtggaacagtcagaaggtggatcaggtggaggaataaaatatagagtacaaaaaaaaattttaaataaaataatggaaaaaaaaaacaacaagtaaactcaagtcgtcactcctgtgtcattctcactggcagctctccttgcttttagagtttgtaggtgctcagtgaatgtggataaacttctcttctttaggtacttttcactcattattaactcggtacaccaagcaggtgaactttctggttaggtcattaattattatagatgtcagtcaagataaagatctgggacatcaaagaatatgattttcttctcatttaaagtatatttcttagggaaatattttgaaatcacttaaagtgaagacaattagtcatgggtcaatgatccaaatgaaaagcaaagttttctcaattagcaggatactaatggcttcataaacatgcagtttcaatatctccaactatataagattctcaaaccaatgagaattatatgtttgacaagaacatatgttgatgaacttgttctctgagtcattcttaatgaataagtatgaatcttttcaagttctactcaaatagagaaggctgaatggaatacccttaggttatactcagaatcatagccaagtggtaaggtctggttcataaattaaagagtatttggagactttgtcaaaagccaattccagtaagaatgtagtgtataaatgggatgctagagagaattctagcaaaacataggaaagtgctatattatagcacagtactagactctagacatcatatagtactagactaaagaataaatgaacatgtagacctgtgcatgaatgccatgtgggtcatgttgcttaaagactaagggtgaaagtgaaggatgatgacacagaaatcccaaaatatcataaagagtcaacaatttttttcttcgataagacttatgtgtaactattcattaacactaatcaggaaaggcctcaagtgttatattaaaatgtagagctaaattatgtatacactcttcattgacttcaaaagcacttttctttactcatcaaacaaaactaaatgtaagttatttcaatagatttcatatgtctaaacatggcatattctgcttattttttcttttgctgtttctgtttttaaaaagcataaacatttactaaagatgaacaatgagaaacctttttcttcatttgaaatacatttcatttatggtgttacagacaaataatattgttttgtcaaattttacttcaaaatattatattttttaacataatatttttatattacctgatcacacttccagtcttcccaggtctgccactctgccttgtgacctgctcccaacctgtccattcctgcccaaaagaaaaaggaaaaaagagaaatatcaaacaaacaaacaaaaccacgcaagttcaatttttattgcccatataatcgctggatcatggtcaaactcccagtagccagcttcttaaagaaaactgagttattccccacctatcacttgtggagaggtacatttcagcatctttaccatacttgggctgtgtcctagaactctctttgtagaccacatttacctggaacccacagacatactcatgcctctgctctcaagtcctgggaacaaaggtaaacaccaacatgttattacagtttttaaaagttctctttgatggatttcgatctaggcgttactttctaggtggagggctagtgtcatgccagggggtaagggttgtcacagaagcctcctatgaatctcaactgtgggtctgcactcatccataccactgcaaaatcagctcctttccctttacagtttgctggagcacagatgatagatggtatctggtgatagtacagaccatggacatccacatggcctttggtatcagcaagtaccatggaccacagcatgatctccagtggcaggacagaccacagacatcaacatgacattctgccacagcaaagaccatgggcaccatcacgtcccttggcagcagcacaggccatgaacattaacatggcctccagggcataggccacagacaccaatatggttaggcctatggattctaaccagcttcgtgtggcagcacacaatacagacatcaacatggtctcagctgacagcacaggccactcacctcaatatggccccaggtggatacatggctcatagacaacatggcttcaggctgcagcagagatcatggacatgtacttggcctttgttggcaacaggggccacagatattgctataactcttggctggattagaaccatggactctaggatgattacaccctcacttgtactttgagggcatgaataaaaggaaaaagaagaaaatcacaaatccaatgtttctggcactaacagggatcagattgtacatggagatgaatggattgatgaaacaaaccacgtatgcttctgtgccatgtcgccctgaacactgcctcaaacctttcagctgatattaaatgaccttccaaacatttataagcattatcttccccttagcataggtaaattcttcaaagacttgcattatcaaaaaagataattggacataaattacaatgcttgtgccccatacataagtgaagtattttcgagcaactttgccataaagaaataaagttatatgactgactgttaggtgacactcctttagccccagcactaaggaggttaagagtgaaggatctttcttagtttgtggccagcctggtctgtactacacacactttattaagcaatcacttttgttactcattttgaatctagaaacatgcagtcctctcactattttaagcaccaatttggcaggaagaaagcattcttccttcttagataccttcttttagtgttatatttaggaggattgcattatcatttaaaaaatagaaaaacattacttacgtgtttatcatctctacataactgccaacttcttcaataaggcaagttcatattactcactcctatatctatagcagttggaaaattgaaaaaaaaacaccctcaaaatattgttgctgaaatcataagattcatgttatttaagataacattatgaataactagtataataattcggtacaaatttatgatatctggtagattgtattagaacaattactgaattaagagaagaagaaccctgattttggtattggtctataggtaatggcaaaaataaagccattttgagccacagtttctgaatcaagaagggaagggctatattttaagtcaatttgtaacactgagaaatcaatattttaatctatcattgattcctctataatatgtcataaaaattgcaaaacttatatatttatagcatatatacaaacatgtgtttatatatatatatatatggaaaatatttttgagcaagtactacaattactattgatgtatgatatataaaagcattggcctcttatgagaaaacttgtactccagatcaagtgtcagaatttatgtacttacaatcattctttatttttcgctttgacctcttactttcaaatattacttttttcttttctttatttattcacattccagattttattccattcacaccccctgtccattctctgactattccacattccatacctcctcgccagccccttgtctctacaaggatgcctccacccccaacccccaccccacatgacctctaaacacactggggcctccagtctcttgaaggttaggtgtatcatccctgattgaacccagccctggcagtcatctgctgtatatgtgttgatggcctcatatcagctggtgtatgctgcctggttggtccagtgtttgagagatcttgggggtccagattaattgagactgctggttaatttttctttgacatggacactctgttctctactgtcatccacatattgaatttatttctgtaatgctacaataatgttttataattcaccagcatttttgaaaatagttcacattttgtattattgaatcattattatatatttatattttgaacatggaaatataggtacattagaattttttgtttcccatgccttaactttgttcccatgtaattactttacatgtaccatatgggaattttaaaatgatgatagagtttataagtgcagtgtgtatgcccccaacctttacactgcagtgcagtatgcaacctaaacatgttagcaaagagagaaattgcatgaataactcaacatggtagcttatctcagaaaccgtttaccatgaggcatttaatacaaccatgtctcagaggtcctaagaaggcagctaaacttttatgcttttcattataatttttcaataagttcaaaaggaaaaatatgctgaaagcctatatggtttaagttagaaagaatacgtgtctataatactcagaggatcaaatcaatagttattttttaaagagttaaaaaatctataggagtaatgtaatttacttttctttcaaaacataaatgtttcctctttggaatttcagccataacacaagaagaccacaatgtaattcactagcaatgtaggctatagcaatgaatctgccgctgtttctctgaaaagctgaaatgcaatcactggaataaacatgttattttttttttttttttttttgggaggagagtaaaagctgattccaaaattactcttcaatgaagaaaactctgatgtgtttaattcagtttataacttttactgaaaacttttatgccaatacaaggtattttattaaatttactttcataggtcactggggtacaaaatgagattcacaatgagctttgttttaggttcaaaggtcatttgctgttaatattaagcactgtggtgatgattctcaaagcacttagggatataggaatagagttcactctcttatgcatgttcataattttgccaaaactcaaaccatattttttccagaaaaaaaagacacatgaagcatacttttctttttaattctattttatttatgagaagaattgtcagagaaattcagacgatgaaggacttaaacttgagggaaactgcagggatactggaccactggctaatgaaagaactgtgaaatggctaaacctattacatacagggtagccacattgatttttatagaagctttaaagacaagataaagaatagtcatgctacaattaacatggaggtctatgcccttcatagttgaacacaggatcagaggaaaagaattaaagagaggaacaatatcctggaaccccacatatatgtgcatccctcttgtatcaaaacttaattttgcttatttttgtcttcataaactcttctgcctttgagaattgtttgatattccaaacaacttcaattgttcattatggggaaagaatattggaaagagtaaaaatagagtggcatgaatatgggcatatgttgggggttggggcaaaaggcatgaaaagcactacaaacagctagacttcaagattcacccaggcattatttgaataaggcatagttgtggctcactcacgtgtatctcagtgttatttatgacatgaatcctttacccttatattagtcagggttctctagagtcacagaacatatggaatgtctccatatattaatgaaaattgttggaatgacttacagcctgaaggtgaactaaccaacaatgagcagctgataatgggaagtccaagactctaacagttgctcagccccatgaggctaggtatttcatctggtcctctatataagttggaatactgaagaagtagatttcaacacatgtgctggcaactaagtacaagcagcctaagaagaatggactgttcatttttccactgtctttatgtaggcctccagtagaaggtatggcatgattaaaggtgtgtatcaccacacctagatttgaaacttactctgttccaggctggccctgaactcggagacctcttgcttctgtctcctgggattaatagctaccttgcttgggcctaagcttttcagggccactatacctcaaggtctggatcaaaagtatgtgtgtcatccgatgtcttgatctaggacaaaaacctgtgtcttccagcctcaggatctgaatcacagctgagccctcaatttctggattgtagtttattccagatgtagtcaagttgacaaccaaaagagccatcacaactccagactcacgattttggaaattattaaaattgttaactgctagaagagtgttacaataagtatattagcctataataaatatatgcatattgcatgaagaaaagaatatactttaagggaatcaatgaaaatgatctcagttatctcttgagatggagaaatgagtaattcccagatttgttctaattttctagatgctattgtaagttctatgtgagctctcatgatgtttatgattgtgtaggagggcagctcatactccttattttgggagcccacctaaaccccacatagtaggcagctgtttatgtcatagtgatattcaaatatccatctctagttaaaatgttcatgtaacaccacagtaatatctctgcctagccatctttttttcttttttttttattacgtgttttcctcaattacatttccaatgctatcccaaaagaaccccacaccctcccccccactcccctacctacccattcccatttttttggccctggcattcccctgtactggggtatataaagtttgcctgtctgataggcctctctttccagtgatggccgactaggccatcttttgatacatatgcagctagagtcaagagctccggggtactggttagttcataatgttgcatctacagggttgcagatgtctttagctccttggatactttctctagctcttccattgggggccctgtgatccatccaatagctgactgtgagcatccacttctgtgtttgctaggccccggcctagtatcacaagagacagctatatcacagtccttctgcctagccatcttaaggaagacttcgtttgcatttgttacccactagttaatcacccacacattccaaaggacacacactttatgtgacgagaaacatgtttagggctggagggatggctcagtgtttaagagcactgactgctcttcctgaggtcctgagttcaattcccagcaaccacatggtagttcatggccatatgcaatgagatctgacgtcctcttctggtgtgcctgaagacagctaaggtatactcacatacaataaataaaacttgggaaaataagctctgtagtacttataaagaaagaaaaagaaaggaaggaaggaaggaaggaagatcctcagctgcagatatgtcaaaactctctaaacatgtttctgtccagtgggcaattgtttccatttggtccactgacagtctcttgtgtactcattggtattttaaatttcaaatgttaggtgaagccatatgaatgagtgtcctgaactgtccaaattccctgtgccttatgaggtcttctaacccagggacacaatacctgtccagtctcttggaacaacaacaacataaaaagcagtagaccccttcagggaagatcttagtgcctccctgcttacatttttttaacatatacactgttcacactttgaaggaccacataggatgttagagtaaaacaatcctggaagatgaaacagttcattttacttctgtaccatgtgccctgtgttgcagccaaagcagtctttacacaacactaattagtgtattctaattctgtagacaacatctttcagtaccttctctgttttgttttgttttctcatagtcaaaatcacttactctcatttagaaaatctttcttgagctgcatgctacagacccctctgaataccacgttccattggcaccctgtaacagacaccattgttcactgatttacactactcaaggctttcctcctatcctcacttggttctctacttccataatatctttgatttctcagcctcacttcatcctgaatcttgtttgatttactcttcaaatatgatatccactataaatactagagaagatgacctcattgccactgaggaaacagatgatcttgggtgaacgcatacagcctccatgattaccatgagaatgatgctcatttttcatctcgttcattgttactgatccaactctgaatgatgccctgtctctgatggaattgatatctccaaactgatctctatatctgcttctggattgttctgtgcttatttgggggtctgcatactttattcagttggaagaaaagaaaaatatcagggtttaatgatacttgaataacattatagtccttgacctgtaagacatggataagagggagaataattcaaacataggaaagaatattaattatctaattcaaaaatatctctgtgttttgcataattattcaagcaagtaaacactatatgatcagagagattaaaattaacttgagtggccaccagtataacactttgtggttatactaagtatcatttaacttcttgtgcatagtatttaatgcaggctgctatgccctgtaatgttaaatattataagattgtgtacacagtgagcgacaaggttacacagcatatgaatgtgctcacaatacagcagtgagtgaagtattaattacttttctcagtttttaattaatttctttatttacatttcaaaagttatctcctttcctggtctcccctctgaaaaccccctatcccccccccccttcccctgctcaccaacccacccactcctgctttcctgccctggcattaccctacactggggcatagaaccttcacaggaccaagggcctctcctcccattgattacccactaggccatcctctgctacatatgctgctggagccatgagtcccaccatgggtaatctttggttgatggtttagtccctaggagctctcagggtactggatatttcatattgttgtcctcctatggggctagaaatcccttcagttctttgggtcctttctctagttccttcattggggaccctgtgctcactccaatagatggctgtgagcatccacttctgtatttgtcaggcactggcagagcttttcaggagacagttatatcaggctcctgtcagcaagcacttgcttgcatccacaatagtgtctgggtttggtgattgtatatgggatggatccccaggaggggcagtctctggatggtcattccttcagtctctgctccacacgttgtctctgtaactccttccatggttattttgttccccctaataccatgattagttcacaaagaagtttgtttgggcttatggttccagaggagtatgtgcccactatgacagtcagcaatggctatagacagtcataatttctgtagcagaaagatgagagctcacattctcatacatgagcataagtcaaagaaaatgcagtagaagtagcagtaggcattaaatagtaaaacctcactccagtgacatcttccctctacaatgacttcaccttcttactatccccaaattgcaccatcaactagggaccaaatgctctaacatctggaccctatggggcatattccctttaaaaccaccagaaaaatatatgtatatatgggcttgggttttagaaacatatagtctaggtgaatgtcagagtttagcccatgaatcagtcaggtacgtcttatttttaacttttagtatgcctttactaaaatcaaaaatctggttctggcataaagcctaaatgtttcacttagaaaataattaatttcttcatcagatattgtgagaccttcacatccttccaatctgatgacagcattctatataaagccacagaaaggctttgcctctgtacagagaggggaaaaaacatttgaaagattattttgagtaagaaagtctctacagttgcagccagtttactgaactgagagctctgtcttctgaatgacaatgtttcattaaggaaggtcacctttcttccatagagagatggccttatcacttctccctccttgatgaagtcatttctataaaatgcagtgagcaagtataaaacatacttcaatttttctctccaaaattggcatcaaagggaaacctaacatttttaatagactaaaaaaggacataattaaagaatcacagttgcagtttaaactgtaaagccaattcttcaggcagactgaaattaagcagttattctaacaacatctaaattttatttccttttactctattttttatgagtatgagtacttgcttttacggatttttatgtaccgtgtgcacacttgttgcccatagaggccagaagatggtaccagactccacagagtttaattaacaagtgcttgtgagtcaccacgtatcttttgggtgctaaaccataatccatgctcttccaaaagcacaagtgctctgaactactcagtaatcgtcctaaacccaaacctcgccttaaacatccagttccatacatgcttagtaaagactcactgtgtgctggttatcatattagctaagagggatggaactaactatcacttaactcaaagagctatggtgtttttaagagagaatgtcaataataataataataatagtaataataataaacaatcaggataaagattaattgcatgagtagccttctctgtatatttgcatggtaggagaaggagagaggagaaaaagagagagagagaaagagagagagagaatttttaaaaagccagttacttagagtcaaggcaaatcagcaatgtgtgtgttccaatcgtatctgtgatttttttctttgtttctttgttttccttttatttatttatttattttttttttttgctttttcttttcttctccattctctctccctctctctcccccttgtctagaaggaaaggtttatttagaattatacaatcccagaattctaaggtccaaaatggtggggcctaccaggcagcatttgacagacctagcagacagagttggaaatgaactgtggggccctcacatcgtaaaacagaagcagaaagcagagagaaagagcagcggtgatggattccaatcagttcactcgatgcttcttctgccgccaggcagcctccttaaatggagctaagaagccgtcagcctcaggagtgctgttccgacactgctgatgaatgctcgctatgcagtcctggatgtggctctggtacttgtgaattttgaataaatctcttaatcatgctcatttctgtcaaagacagctgaaaaatgattgaagaactgagctgttgggtgtctgattgggatgaagtagttttaagaagctgattacatacttcacaagtgcttagataaataaattataatcactattatcaacattaccctaaagatatgtgtattctttctagcatttatatctctaccaccagtaacagtacattctcacatagagcatattctgggacctggtgaggtatttcgcatacataagtgcaatttgtatgtgtcagaaaatgcacagagaatgccagggattctgacagttgtgtttctatattttaatcattaatcatttgaagaacattttcatgctattgtcctggtcattaaaaattatattttatggtaagtgtctgcctgagacattgtcatccatggtattttgacagtactttttgtcccactaatttagtagagacagctctggctgtgaagttactttgtagtgaggctcaatagcagggtatatgagttatgattcaaaagaaagtggaccaatacatttgtttagaaactcaagcaattaactcaaaagaggtaaaattggtggattagagcaggcctctttattttatgctatgttctccccagagcgtgtcagactgcggtggctcaagagaatgcccaggataactctgcctggagggaaaaaaaggtcacagcaattcctcctgacacaattagttcagacaagacatgggtgttcactctaccaggagtttttgagactgctgtaatcagtagtgtgattgttgagctctgtttgagataacagcaattgattgagtgtctcggcctagagtgtgactagatattgtgaaaaactagggagaagaaaatagaaacaaaatggaaagcttgcatcgttatagactgcatcttgtgatgattcttcttgattccctcgtgcttgcagactggagatatagcttgagaaatgctgggtactagtggtcggttactgtctgtctgtctgtatgtatgtatgtctgtctatctatgtatctatccatccatctatcagatatctatcatctacctaccatctatctatttattagacaaggtcttataaataactttggctggcctcaaatgtgtattcttcctgtctcattctttcaaattctggaattatgggcacacatcacctctgacataaaattttaaataaagtactttctataaattagaattaaccaaaactatgagaacattattttttcatacatgagcagataataaatatataattgaacctggtcatataactttcattgtagcaaaaaggagaatagtttaatgcactgaaaatggaggtaacgtttatagcctcactagaaagaagtttctattgcagttctgtttacattttcataccagtgtgatctgtgataattttcataagcaatagcatttttcattcatttatcttcctctgcattcagaatctggatattttcaactgtagaaacttgagtccttactagttcatcggcatagtatgaataatcagagtgaagattctaagatacttctgaagcatttaaaatatccacttaaattttgcaaaaaaaaaaaaaattctaaattacatttctcttgcattgaagataacatggactctgcggagaattgcacaaaaagatgatgcagtttcaagggaagtccctaagacaatattcttttcattataaatgcatggagagagtaaagaaaattaggtagtcctttatccaaatgcagcccatgcttgtcgttgaatgttattatgccaagtaattcatccagataaaaggctcttaatgttatcctacagtaagtgatattcttatttgattatacctgtgcatatatggacatatgcccataataggaaatcaaagaccgggccatatgcagaatagtcaagccctctactgttgtgagaaatattaaaaaaaaaaaaaaaaagaacccgccaactctcagcaggatcaggccatactcctgcacttctgctgcagccaacaactctcctgatctagcccctgtgccaggagatctcactcacttggtctctcagcacaccaactccccagccctgagaggccacgtggctcccaccaggccatctctctgacaggccccgagttcctcttgctttcacccaacgccctacgcacccctggtgagccgtctcaccacttaattaccaggtagagtcgagactcttaatgcttaattagccaatcagatttatgtatcaataataacacaatttacatgatgccaatacaataatttcagatccaaatgataatgataaagctttaacccaattactataaccttttgataataccaggtccgactccattnnnnnnnnnnnnnnnnnnnnatagcagggtatatgagttatgattcaaaagaaagtggaccaatacatttgtttagaaactcaagcaattaactcaaaagaggtaaaattggtggattagagcaggcctctttattttatgctatgttctccccagagcgtgtcagactgcggtggctcaagagaatgcccaggataactctgcctggagggaaaaaaaggtcacagcaattcctcctgacacaattagttcagacaagacatgggtgttcactctaccaggagtttttgagactgctgtaatcagtagtgtgattgttgagctctgtttgagataacagcaattgattgagtgtctcggcctagagtgtgactagatattgtgaaaaactagggagaagaaaatagaaacaaaatggaaagcttgcatcgttatagactgcatcttgtgatgattcttcttgattccctcgtgcttgcagactggagatatagcttgagaaatgctgggtactagtggtcggttactgtctgtctgtatgtatgtatgtctgtctatctatgtatctatccatccatctatcagatatctatcatctacctaccatctatctatttattagacaaggtcttataaataactttggctggcctcaaatgtgtattcttcctgtctcattctttcaaattctggaattatgggcacacatcacctctgacataaaattttaaataaagtactttctataaattagaattaaccaaaactatgagaacattattttttcatacatgagcagataataaatatataattgaacctggtcatataactttcattgtagcaaaaaggagaatagtttaatgcactgaaaatggaggtaacgtttatagcctcactagaaagaagtttctattgcagttctgtttacattttcataccagtgtgatctgtgataattttcataagcaatagcatttttcattcatttatcttcctctgcattcagaatctggatattttcaactgtagaaacttgagtccttactagttcatcggcatagtatgaataatcagagtgaagattctaagatacttctgaagcatttaaaatatccacttaaattttgcaaaaaaaaaaaaaattctaaattacatttctcttgcatnnnnnnnnnnnnnnnnnnnntgccctaatgtgattggacaggaaaaatcctgcgccactctactgcttagctaacctatgtattatcagcagccctgtatttattttcagtgagaatagggaagatttcacaggcatcattctcagtttaacttttaagaaaaggaaagaaacatctgaaaaatgaattcgttatagcttacatagtactatcagaccttattctaaaatgcttaacagtgtttcatctcaggttttataattatatcatggttcccagcagaagtgaaaattcatgaactataattctgtatattgcattaaagttagctgatagcatgcctggcacccgttggtaaagtcattgccattgacatcaacagagaagttcagtgatgttgtcttactttggtcagtacaactgtatcaatttttatgaggctacaagtaacattgtgtaactttataaagtacatgctcataatagggaaattagaaagcagacactaaaaaggcaaaaaaaaaaatacaatatataaaaacttttcatttgggacataagtactccatttttattactaaaatttgtttcaattgcacagttatttgaaattcgttttatatagtagggtgaatattttctgcaaagattttgtgtgtgtgtgtgtatgtatgtgtgatcgttaagtctattatattttacggttataaatgctaattgaaataaaaagaatatcatgtctttcccagtgatgatttgtaagtacacaaggtcatattgtaatactatgattgtgattcatgtttctaaaattttatgttaataatgttggcaacgtgtctgtcagtgtttgaacataatttacaatgaatttattcagtgggtagctgagccatttgtagtttacaagaaacagacaaaatgcctctgaccttaacaggtatacaaataaaaatagtcagtatattaaacaaagggacactgggtctactccgtttaagtcaggttcttttaacaaaaaagataggaaaagaaacccgcaccaatatgtaataaaaaaaaatcaacatagatttagtaatcagagtttctcttaagttgaataaaagattgccagagcagtgatcccatgaaaagcagtctctgcgtttcctgggattaatggtcacatcctctcttaatgtcctgagttccctggaccaaggcagaagtcatctacatagtacttcctagtcattagctagagcaatgatggactttcagaaagcaccattgccactgtgatgataattgggacccatgagcttgctttttctccttccttccttcctttctttctttctttctttctttctttctttctttctttctttctttctttctttctttcctttctttcnnnnnnnnnnnnnnnnnnnnnnnnnnnnnnnnnnnnnnnnnnnnnnnnnnnnnnnnnnnnnnnnnnnnnnnnnnnnnnnnnnnnnnnnnnnnnnnnnnnnnnnnnnnnnnnnnnnnnnnnnnnnnnnnnnnnnnnncctccctccctctctctctctctctccctctttctttctttctctctttctaccttttttgattctttacttaatgcttctgaccaagaggacactgggaagacttttttgtttctggagtcatacttatgaaacattatctgtaaaaaacaaaacaaaacaaaaccaaaacaaaaaacatgcaagcatacatttaagttcttaaagaaaggaaagagaatatccatataatctgtattggttggatatgagatataataaatttctatctatgtggagttaagacacattttctgagatagtgttagatcctaatataaattcaggattctgtgtccagcatatgcatatgtgtgtaagctggttatgaaactactttcaaggatgcatgtgtgtgtgaggacggttttgtaagaagccagattgtaacatagcttaagaataacacaaatcctttaaatactttcctaagttttgttttgtaagattcaaacaaaaaaaaaagttttttttcttatctaagcacttctgatatccaagatctgctaaaaacattcattactatgatgacaaaccctttctgttgatagctttcttttttttaattaggtattttcttcatttacatttcaaatgctatccccaaagtccctcatacccttccccccccatccaccccctcccacttcttggccctggtgttcccctgtactgaggcatataaagttggcaagactaaggggtctctcttcccaatgatggccaactaggccatcttctgctacatatgcagctagagacacaagctctgggggtaatagttagttcatattgttgttccacctatagagttgcagaccctttagctccttgggtattttttctagctctttcattggggccctgtgttccatccaatagctgactgtgagcatccacttctgtgtttgttgctttaagaatagtcatctttagattttcaaggccagtctttaatgtgctccagctattcacaggtgttgtagattttggagtggcccaaatcaaagctctgctttggggcttggatggtacctgagctgattagcctaccagattgccagcacctagaccaccagggcaagctctccagctctcatgtatgggctttagtttttcaaaacctacatttagtcatagtgaagtgatttaacctcccttctagcataccatccaccaaaggtagtaggaaagaaagatacagaggaagtggacctgtttagaaatggttctttggagcaaatcccatttgcattgtcaggaaatgagcagttcagttcacaggttagctgcagctgctcgaaatactctcaaacacttcacaaatatcccagcaatccagtttaacctatcaggaacagccacacaggcctcagtcaaatcacccaaggtcagcaggagcaaccaggagaattagggaagccagaagttctcaactatgtctctttcaacaagatgagagaccaagaactgtcgcaaagctagctctataagcaaccccatctcacagtcctgttgagtcttatttgtattccctctaaatatcatgtgatctccacaggtcttctctcaccacatgtcttaccttagcacatgagcctgtcttagcaaaactccatgtgagtttatatcagtctatatcagctgacatcactctgccaatagtcctgagtcctcagaggctacaagaacctgacagcataccacttgaagttttttgtgtgtgcgtttctctttaaaggagtcctgacaaacatatctcaacaaagcatgtaaagtagaccaatacatgtgtgtcattattgaagatccttcatcatgcatcctttcccgtgcttgctttagtgagatatcctttcacctgtgcccatttcaggaaaacactcattaatgtgtttgccacagcaaaacaccacaactgactttccacagaactctttaagtttccacttcactcatgaccacatctggctcacccatgccttcctaccagacccagcttcactatgctacccaggcaaggtgtgaggcctggtatcccaagcctacagctagattttcagactgccacaggtggccatgacacatggcaacaactagatcttctagacaagtccctaggagattcagtattgatagtgtcgcagaagccccaggagttgaacctgaccaatgagtcattgcaatgaccatttgcaagtaaaaacctatggacaaaagggtctaatttgggacgtgctgtaacatactactgcttcatcaagatgaggttttgtagttgttctgttttatttcaatttttttgttgttgtttatcttttgtgggggagggtgcattgttagataggaaaggatggagaagatgagtgagattgtggtgcatgatgtgaaattcacaaaggaaagaaaaacacttaaaaagctgtttaatttataagaaagaaaagaaagaaagaaagaaagaaagaaagaaagaaagaaagagagaaagaaagaaagaaagaaagaaagaaagaaagaaagaaagaaagaaagaaagaaagaaagaaagaaagaaagaaaggaaggaaggaaggaaggaagaaagaaagaaagaaagaaagaaaaaaagaaagaaagaaaagaaagctgagcaaactatgggtaacaagctggggtggagtgttccagtgttcctctacagtctctgctttagttcctgcctagcttctcctgatgagggtctatactagaaaggagaaatgaacccttcctttcccggctgattttcgttcatggtgtttatagcagtgataaaagcttataggtattcatctatcatatgtcttttccttctataatctatcttcttatttttacttacttattatcatctatttctgtatcatctatatatccattgtctttatttagctacctactacccattagttatcttctttcccttttacttatcatggtctctatcaatcacctatcatctactccaatcatttatttcttatccatttttaatattgttcatgtgtttatcctttgttatcatggatctgtcatctctcatcatcttcctatgcatcatcttctgtctgaatattcccttgtcactgtctactttccctctgaatagtctgtcattactgccttctgattccatctcttcactgcctgtagagcatgtgttatttatgtatggtcatttggttcaactaattatccctaagatgcttaggtttttttttttccattttcttaaatttctgaaggacacagcaatggggcttcttcctgttttgcatctttgagaacatgtgtgcttattcagaagtattgaaggtgagggtgccaggtaaagaaggtgttccttaaaagcttagttttgaacgttaaagcaagtgtctgtctgtgtgtgtgtgtgtgtgtgtgtgtgtgtgtgtgtgtgtgtgtttgtgacagactctcactatagagctctgactgtccagggacacactgtgtagaccagctgacctcaaactcacagaaagccacaatagtgtcaactggccagacatacggaggtcccggggactgaatcaccaaccaaagagaacacatggaaggacccatggctctgggcacatatatggcagaggatggacttgttggacaacaatagtgttagtggcccttggtcctgtgggggctccatttcccagtgtaggggaatgcctggtcaggaaggctagaatggttgtgtaggtggaagagcaccctcatagaggcaggagggggggatgggataggggctttagggaggagagacctggaaagggaataacacttgaaatgtaagtaaagaaaatatacaataaaagaaaagataataataagcaaaaaaaagaaaagaaaagataataatgagcaaaaaaaagaaaagaaaagataataatgagcaaaaaaaagaaagaaaagaaaagaaaagaaaagaaaagaaaagaaaaaggtgtgaagtataatgcaggacttaaagcaaacatttttatagcactaaatgttgactggtaattttcatcaataagcagtgatatctttgtattatcaaaaaaaaaaatagttatctttcccctttttccatcgtggctccctcccatccttcctcccttccttcctttcattctttccttcatctttgtgtgtctctgtctgtccctccatctgtttatctctgtcactctctgtacggctgcacatttcacaagccttgcagatggatgtcagaggagaacctgtagggtttatttattccttcacatgggtcttctagatcaaattcaagtcgtcaggcttggcagttttacctaatttgccatgtccccagccttttcttccatattcgtaatttctcctttaaggtcaattagaatcaccaatattttgatttggggggaataaataaatatgctcaaaacaagaaacttaaaaacaaaacaaaaacacaaataattttttctcaaactattattttgaataaactttaagtcttaatataaattatgttttcaacattcaataaactattttcttagtgactatataagaggaaattgatttagctaagtagatatctttggtcaccacagaattgagaaaatgttcatgccaatttaccatatatgttaacttatcacaccagacattactttcaatgagttttaacttttttctaaaaccacaacaaaatttaatctaggatacagaaatcaatactttatttttgagatggagaaatcaaggtcaaaattgtttaattatttatttgaccagctccttactctgatgtttactcactggattagctagtaaattactttcctgagtttcaatttcttcttattcaagattcatacgtttctgtggagtccagattctgtgttctaacattgggggcatttttacttaaagtgcaggctggtatattacttctgcctttccaataaatttgtaaatcaaaacactgtaattgttccatttcttcagcttgctcctgtgaattccattctctcccagtgaatcctgtggatcacaaggtggccgtctaatgaacctgaagtttctgtctttgttcagtgatgagaatggagataatatgtttccaaactagttaaaagtccaataattgagtactgatatttaaaaaaaccaaacctcatcaatagccaggttgacataccacattaataaaattggagtgggcatgactttagcactggaggtgatactgggatggagagatatggaattgagttgattttaggggaattgagaatgtgataattgatttgagataatagagaggagataactagaccatgcctaaacccagaatcatagcctgaaaaataattcaatgtttgtgtcattcactctctattccaaaacgtttacagcagggatggcataaatgatgggaaagtgataggcttctacaatgaatattgttgacaacaactgtgccaatatataaggatgaaggaaagaatgaaatatatatatatatatatttcagcacaaacaattttaatgaattccactatattaacaaagaaataatttctactttgcctcaatcctattaattttatggtattttctaagtatcaatggcggcatatgtatcctctctttttaaagaagaaaatacaatagaatagaatgtaaacaaaacagtataacaacttcacagtcatttgtatttgagtgtattatagcatgcatttaaagattctgtttaatatttattttaagcataatatctatattatgctcagggtccaatttctcagtaactttggcctatgtatatttacaattattttcaataaaatgtacttggagtttacctgccaacaaacacctgtatcctcaccccaacctccttctccatttctaggattgcaggcttgctcatgctcacatgcatttctctttccaattgtgagctttgggattcacactgatccttgtgtttgcaaggaaagtgctttactgactgagctgcccacattactcaagtaagcatgtttttttgattttgctttgttttgttttgttttgttttgttttataaatcaaaaatactgtgcttgtccttttctcgcacactgtaaatcatagtctttcttcttcgtgaaaactttgaacccctgggcaaacttgcactgtacaacctggcaagacttactttcctgctcatgataaacaggtctcacaacacgggtgataaaaaaaaaattgtttgaacaaatatacacacggcttacagaagtgtgaacggaaagcagcactcagtcaacctacatcacattgtgcatcgtgctctaccaccactttaaggaaaatatacatttagttttgtatggagaaaagtggttagctaaatagatttgtaaggggaaacagaaattctcttgggcatgactctgattgcaagaagaggactgtgaagttattttttttcttgtttcaaatatacaaaatgttcaagaggaattgaaaatgggcagtggatttctcattctcattcatgaatgctctatgaacgttatcgtttacttctttaaacatgaaaataaccaaggccagaagtgaacctgtttcagaactgagaggaaaaggctcattgtccctaggaaaatcaattctgagctgttgtacaagcaagcaatgcatgaatcaatcttggttaatgttataactttatcttttaactatgctaagcattttatgtggaatgttaatcttttggagaattgttttcttttcatatttcttaaattagggaaaagactgaatttttttttaattaagctagaaaagaattagaagatttcatcttgggttgtaaagaatttagactgaaaataatagtacaaatggcagaaacaggggctatttatgaatatgtgttagcaagtagcatccttaatgctgatataatgcattttttattcccacaatgagaaagattaagtagcttttctgggactgacaggcagtctaatcccacttttatattagctttctctgactctaaagttaccttcctcaatgtataatgtagattgtgtctgcttttagctcttatttcacaaggagagcttaattccacctctgttgctgttgagtgtattcattccattctttagatcaattgattgtgttgtttctttgattacctacagagattcattaggaactgacttatcaatctctgtatatctttggtatatctatataacacacaaatattcattataacacatgtatattcgtgtgttaaagggattcaacttgcaatcatcaaaatcatagggcagcaaaaagcctcagaaactgtagatgcaccaagcagaaacatacatttagttttacaattccccacttacagttgcacagttctccaaatttgtatggagcataacaataggtaagtaggaagaacacatatattattcctgatttcaagtggtttaaacaaagacatgtcccccaagaactcatcaggggtacagattgttgatcctagctaatgctagtgcttgatttttatcaaagtaggctattatatctattaactaagagaaatttaatttagactaactaaccatgctgcattcaattgtaagcatgagtaaacagtaaagtttccattttcctttacaagtgtgccagtacaatgccccatgatgcacttgtgtgcaagtgggcaggtaaattctggactggctgctgaaatggcaaagggcagagaatgtgtgcattttaggacagatttctaatcatattggatctatgaacttagttcagttttccaatcacaattcattcaacatgaaattttcttcctacttgctaataggtaggtaaattatcttaaggactgtcaagaaaaaaatttctttctgagatgcttgcaaatacagattggaaagcaagttatcagtagcatcagataggaaagtctttggattacttagaattcctcatcaaattttgttaaatctttgtatttttatggacttccaaacagcaattgtgttctgaatttatatagaaatatcttcactgttttatttcacataacatagaagaatatatcagcagagtagcctggtttctgtctagtgtttggatcattttgtgctgctgggagatatgaggtgtagacatttcatatttcaggaggaatacatataatttagtagccaaaccattcattgttgaaaagagatttttatcgtttgcccaaaaacattatcactataataaacatctaacctagctatttttgagccctctggttcaaagacaaaacttaatggggaaaagaggtgggagagatgagcaataggtcaaagagggaagaaacaacaaggcaagattctaccagaatattaaaaccaaggagaaaagcaatgcaaaagggatgaacagggagacagacacaggagatggcagagcaaaagctttggaaccatctaacctgcatttaattgttaggtatgtcacccgtctataggattataaaccaattacctaatttaaaatcccataacaaaatgggaaaacatgagaaagaacattaaagttgcagcaacatgctgtgtgtgaatgcacatgtatgtttctgtgtgtctctgtcagcattgtctgtctgtctgtctgtctgtctgtctgtatctcgtgtgtgtttattggggcctgctgtcactgatatccctaatctataattcagaaccttctcaatggtgctgacctctaagcccagtcttcaatgttgagatactgcttttcaaatagcatacttagaagtgagacaggagagtggcccgacctcctggtcagcacccacatgcactcgagctgattctactgatctatttatctgagctcatgctgttttgtgacatttcattcttcatggacttccagcgagatgatttaaggtgcacacatcaatcagagcctaatcatgctcaaaagccagtggcctttcaggggatgagacaagcgaccattgagaccagttcaatcaaggaggctcttgggttcagagactcccacctgaaataaatctggagaaggcttttaaattcaataagcactgatgaagtaggaacccatgaggcaccctgactgtacaggataaatacatctgtcccagagcagccataaataacactctttggttttcatctataattaatactaagtagtagtaacagttgtttcattgaatataatggctaaggctactcctatctgtgttgaagtttaaagtaaaatggcttaaaattataaggcaatgtgttacaatatgcaaacatttttaggagggagagaggggcaaataaaacattttaatttttgctttatcttattatgaacaaggatattaaatttcactttatttttaagaaaaacaccgagagatgaaggttcaaaatccttggctctggttattttaattcaaagtctcagtaacttgagaataaagtgaactgactccaaggttgtagttcttgtcatgtaagacttggtgaaaatggaaaaaaaaaaaaaagcttagctgataaaaatgcttcttcgaatgaaaatagaagacgaggggctagggagttttctgagttagtaaagtgcttgctcgataaacaagaagacctgtgttcacattcccaggtccaggaaagaagcccagcatggcaatgcctggaattgtaacactgggcttagggaaaaggcatgtggctggaacatggtcagcagcaagtcttgttcaactaggtatcgttagagaccccatctcaaaattgatagacagtggcaaaagaagatgtttaatgctgccccgacctgcagaaataatcagcggggacctagcacaggggcgagagagtgggagggacaagaaacacaaagaacgagagcaagacaactggactgatcaagcacagaaaaactttattcaggagtggcaatataagtataagcaagaggagccttcaaggaaggcgggaagagcctaggggctctccaaaggtcaggtggcaatctcagctcctggaactaatggtcatagcgtcctctctactcataaacattattactgttatgaccatgaatgttctctcaggatggtttctgtaaggcagaacttttccacaaggccatggctcctggcataatgccaaaccccaacttgcacattcacttacacattcatatatagggacatatatgcacataattatataaaaactaaaaatgtaaaaatgcatttgagtcagctagcaatcttcggagtcagataggtccctgagttcaagacagcaaggtgtgggttctctcctgtatctttgcgagtcattttcattcaggctttactcatctatgtatagtttaaaaagaaacaagtatctatcattttttaatatttgcacgtatattctatctcttccaatgaaataacactggaaagtgctgtgatttcccaacatctggcatgaagggcacaagttgatttgtttagtggcacctttgaattaatgatacatccaggatttaattataattttccattaagaaaacttgattgatggatataataactgaaatgtaatatacatctttcttatgggtctccatgtaactcagagtgtatttatgacaattattttcacttaaggagataattgctactttcaaaaatcctttttaaaatgccatggttttaaagtgtctaaaataattttcacttctttttctcccgatagatattttaaatattgtattgttagaacagagcagtgcgaggtttttgaaagtatccaatttctgcccagacaggcaattaaaatataaattctaggagaatttggcctgccagtaaaagagataaatatcatgagaaggattgcctatagaggtaagtgtgcctctaaatgtaatattccctctcaaagccgaggtcaaaggccagtaaactaagcgatttctggtgctttaattgtagatagccatagttctttagaaaatttcagcgtaaggtttgtcaaaggcaagaacactaactgacatcacatgtctatcacctaacagctttgtagcctagaactacagtgttctttaatgtatatcttcttttatttttctacactgcagtgataactgaaagatcttctgtaagaaatactctgccagagcctgacaaataaagaagtggatgcccatagccatctgttggactgagcacaggtccccagtgaaggagctagagaaaggacgaaaggtagctgaaggggtgtgcagccccctaggaggaactacagtatgagctagccagtaccccagagctcccaaagtgttcatgtggtggaactcatggctccagctacatatatagcagaggatggcctagtctattcagtagaaggagaggcccttagtcttgtgaaggctctatgccccagtgtaggtaaatgccaaggccaggaagcgggagtgggtgggttgttgagcaggggtagggagagggaatagggggcttttggaggggaaacccggaaagggaataacatttgaaatttaaataaagaaaatatctaataataaaaagaataaaaaatgctttgaaaatgctgtttaaaattaccaacagaatcaactaacctgtacccttggcatctctcatagactgagctacgaacaaaagagcatacacacattggaccaaagccctctgcacatatgtaaatgtgtagcttagtcttcatgtaggtcccccaagaacttgagcagaggctatccctaaatctgttgcttctctgccaaatacattttcctaactggacagccttgtctgccttctgtgggagagggtgtacctagctctgcagagacttaatgtgccagggtaaggtgatacccagagggagcctccaatttctcagaggataataggagggagtagctaaggggctgtgtgggggactgggaggaaggcagtggggtcaaaaattatatggaagagtttggagggaggacaggaaagggagaaatttataattaaatagaaaataaaatcaaagacaaaacagcgctgctgcagcatggtgtgtatagaattgattacaaaaaatttaccttagaacaaatgttgttatttcttcaaatgtagaacaacaacaaaaaatagaaatagaagccacaaactttgaacatcagaagtcacaatgactctcactatggtttgtactgtgtggtgatgatagttgtcatgatggtaatgatagagatgatggtgatggagaggagatggtcatggtgatggtggtaatgaccaggtcagtatatggaataggacagaatttcaaacccatttatgaataatgggaacagagtgacctctcaatgttgctagagctttgtgtagagtcagagatctatttttttaagtcatgtagtattaggcttcattattcttgttcaatttaaggacaaaattattgataagcttctatataacaggcaaacagtgaacttttatctttctatagctggcaaactgtgatagagttatcctatcctactaaatgtaccagattaattacctaaattaatggatttcactgcagcatttcaactaatagatgttttgaggttttccagttcttctctttatctgctaaaacaataaattgccagtacctgaaagaggtcgtgtcataagaacacaagttaggaaaattcttatataaaaagctcagttcaagactttgtaaatcagtttatttcatgttaacgtaattaatatcctgactttcataggtgagataatcttttaacaaaaggcctttaaactaggagtggtgccacagacatgtaatcgcaggatttaggaggctgaagcaggagaaccacgagtttaaggccagtctggaatatatacaagtctctgtcagcataaaagtttatttatgggctagagagatggcttttattcattagaatgagttaatgaatcagaggctgttagaatcaagattcagccattgactaggtaagctaacagctttgagaagcagaattgatagtagggaagtgttatggcagcccaaacatgaacaatgaccatagctatagagattctaacatgtacaggaggaaagccaattagaactgaaatgaacacgaagaactacaggccactaagaaatgtagagagctagagaaatattctcccacacaacaccacaccaattgattatacaatactaaatagccctgaaaaaatatgtatatctacaagcaacattatagttcataattatgtatttaggagtgtgtgattttgtgtgtgtgagagagagagagagaattaataataaattatatcattagtttgaatgagagatatataagagggtttaagggaagatggaatgggtgaaattatgtgacattacattctcaaatagtaaaataattgttaaatggtttgaatgcttgcaagacagaatgcaaagtaagtggaggctgacattgtatataagtaactgtgaagatgtttactatgataaagatagtgactagaggtgagatattgacatttgattactttgcttgatgttttaatgtgttaatttatttaaaggtggatatactatgttaataatgctaattgatgttggttttcttgtagtaatactatccttttaagaacaaagtattttttcttcatgcacaataatatcttctagaattataatacacagtaaaacaaaaaaatatatttctgggtatattcattcctggcatgttccaccatgagatccagatatggtttatgacannnnnnnnnnnnnnnnnnnncctgtttgagttccagtcctgacttcccttggtgatgaacagcagtatggaagtgtaagccaaataaaccctttcctccccaacttgcttcttggtcatgatgtttgtgcaggaatagaaaccctgactaagacaaattggtaccagaagtggggtattcctatgacatcttgaccatgttttggggaggactgtggaagaactttggaactttgggcttgaagatccatccgttgttaagagctctgtcggatgttgtgtaggagcttggaagataatgttgagaacagtgcagaagatggaggcctggcttgtgaaatttcaaagggaaaaaattaaagactcttttcagggccattcctgttttgattgtgaagattatgtagttctggttagctggggctgaagaatcagctgtgattaacaagataccagaactactaaagcaaaaactttgcattactgggactattgatgctggttagctggagctaagaaattagcggtgattaaaaagagaccagcatcattgaggtgacatcttctgggaagtgttttctgaaagcacaaaaaggctgtcttccagagatagccaaggttgtattcctgctgcagcgggacttggtaatatgtaagggtcacccaggtggtactggttttgaaggcatgaaggggtcacgcagagcagctgaggctcagcactgtgagaggccatggaaggccattggtgaaggtgcagcctcagttgcaattgaaggcccaggactgaaggggtcatgcagtgttttggagatgccagtgccatgagatgaccaccaagagcagcagcagcagtggagtacaggcatctggagcctagaggaccatgcgtgtgctacaagaggcatggctggagaagtgacccaagcccttggaggagcccagaagatcgtgagttggatcccagacattggatggttggagattgatttttgctttgattgtgactgtgccctgatattttccctcttgaaggaagaaactgttttagtggagccctcagttaagagacttttaactgaggccccttgtgggtggtgccatctctgggctggtagtcttgggttctataagagagcaggctgagcaagccaggagaggcaagccagtaaagaacatccctccatggcctctgcatcagctcctgcttcctggcctgtttgagttccagtcctgacttccttggtgatgaacagcagtatggaagtgtaagccaaataaaccctttcctccccaacttgcttcttgcaaaacgactttggattttaaaagagatggatattttaaagagattgaaattttaagaatatgtaaagactgtgggacttttaaagttgtttagatcttggggatgaataagaatgtaagggttgagggttactagtgatgtgtttgtgtgtcaagttgacaaggggtcaattgtactggctagttttgtgtcaacttgatacagctggagttatcacagagaaaggagcttcaattgaggaaatgcctccatgagatccaactgtaaggcattttnnnnnnnnnnnnnnnnnnnntgtgtgtgtgtgtgtgtgtgtgtgtgtgagagagagagagagagagagagagagagagaattatgagagagagagagagaattattaataaattatatcattagtttgaatgagagatatataagagggtttaagggaagatggaatgggtgaaattatgtgacattacattctcaaatagtaaaataattgttaaatggtttgaatgcttgcaagacagaatgcaaagtaagtggaggctgacattgtatataagtaactgtgaagatgtttactatgataaagatagtgactagaggtgagatattgacatttgattactttgcttgatgttttaatgtgttaatttatttaaaggtggatatactatgttaataatgctaattgatgttggttttcttgtagtaatactatccttttaagaacaaagtattttttcttcatgcacaataatatcttctagaattataatacacagtaaaacaaaaaaatatatttctgggtatattcattcctggcatgttccaccatgagatccagatatggtttatgacagtgtgaaagaagagcttcagtagaatagatagatagatagatagatagatagatagatagatagatagatagatagatagatgatagaataaaaatgtatgagagacctaatagagacttatcgaagactgacataattgtgaagcatcttgcatactgtttaatttcattgtgtcaagtttactagggcatcaacactgtggtaaacttattacagtgatatttttatactgagaattgaagttgttgaaaatgtgtctgagacacctatgagagccattagcaattgtgactcccaccttcactgctggtattgattctctctaggaagaccctggggcaaagtgactcttgagcctaaacacccactgaaaactaggttctcagtgatcttattgaacacagatgctgttgggaggaaggaggaaactcaaactcagggacaatcgcacagctctcttctccaagaccaggtttggatttccaggaccattgaaacctatttcataaattggctcccattagatgtctttctgtttgttggtttaatttctagacaactgtacttgatacaagcttaacctgctgggtagtgaacttgaaaccctgctcctctataatgaaggtcactgcggagggacattcattgaggtggttgttaaattgctgagttttcaaggactttccatgaactccagctgtaattccaagctggtatttcagtaaggcagaaagacttaaaatggtctatttcccctattctctctggcaatttgctgtaagtgctgattattttgtcaagacttttgagctcagagcgctgactataatatcctcagcctttgatggactgtggctagaagaataagtgtttgaaatgaaatgcctggattacttcggggaaaagttagcaatgaagcagtgcttactcacctttggggaagactgagtaaatgctaataagcaacaattaggagtcttccatttattggaaaatatcatctgaatattcccccatattgttcaatcacaatagccagccatatgatttcattgtaagtgagaatcctgaaaaggaaaggcctttggtattctcttgaggacttttagtaacagtcgtatataaaacacaaaaatttcaacatatctcttttggagtttaggaatagtattatctcttactgaaggggatgtttactcagcaagttctgggttcccgatcatttagaattatttttaacatctatataagatattttgtgaagacacaaaaatgctgacaacttattatcattagctacttttatagatctatgaaacatttaactctattttaaagtcatttctcgcatctaggaaaattttagctattaaatttatatgagataccacatgtcttattacgcagtttaagcaaactatgttgtaacagtaaaaaaaaaattaattccatagaataagtattcttaagccctatattatgtagttaataacattttctttatatagttacaaaggtgaaaaataccagaattataaaattaatatgaaatagtaaattttttttactcatgatccaaatgatgaaaatttattggtgaattagtggagacctaaactgtattcttcaaaggactgtgaagcaatatgtttctatttataatttttatattacctggcccatgaaaattggtcttcaactttatttagacaattatgtatacaaatattaagtaatgggtccttgaatccatttgaatctctatttcaatatatttatttttatttcatttatatgagttttgcctacatgtgtatatggatacctcttccatgcctgatgctccctaaagtagatgactgtcttgaatcctctggagctgcagctccatgtggttgtaagctgctaccttgtgggtggccgcaaacctcgattgtttcaagatcattcacttaaacaacaaagtatatggtggaaaataaggttgggtacaatactcaaaatttacttaagtctgtgttcactgcagttaatgaaagcagccttagtcctaataaaattatggaattaaataacatctttgatttctgtagcaaactctccagtaagtatagaatgttatgttctgttgagaaggtggtggctgcttcatgggatagactaagacacatttgagaatgtggtgtttatgaagacacaacagaggtcttagtgagtccttcctggtcttacaaacaatcagattaagtggaaaaggagcaggaaacaatatcagatacttcaaaatcatgttgcatagctggatttatcatctgtcctaggaaatatgaggatgtcaaagaaaatcatgaaggtattctacttttattataccatttttatttcatattatcaaaaacacatgttatagtttatatttcaacaacttacattatacaagaaagagggtctatactaattcagagactatgtagtaggaaaagagaattatgaactatgcaagggcttaaataaaaagcagagattaatcttatatatcaagcactattgataatactcaattctacactaaagtccttaaactatggcattgtcattttacattattagaaattatttacaaaatgtggggtagttaccagagtgacctgaaaaagaaatacaagttattgttgggttgtgttagagagaactgaaaataatttcccccatagaaaaatgacttgaagagtaaaatcaaactcaacttgacatagatcagaggtgactttcttgttactatgtgatgttatacatcctcttggattgttctgcctcataactactcatgatcaacccattctaaggcctatcaattctcatttcctcagccttaccattagtccagtagagatgcagatcttttgctaccaatcatagaacatatcgcttctccatctgtcagctagagcacaacttcaaagtgacattctgatgaaggcttcctcctcacaaattcatcacatagtcattaaagaatgaaaaacaaacaagcaaacgcacacacacacacacacacacacacacaactgcaacaaaaataaaaatgaaccacactccttagcataacttttaaatttgatttttaaagtcattccttatatgaatctgtgacccaaatgaataggactcataaaatttactctccattgtcattgtgactatatttttgattgtttggttctcaaaactacgagccatttctacttactggaccacagaatctgagtactcatacctcgcttctcaaatggcactcccttttatcatccatcattctttctcagtagaattgactttgcattctgaggacagtacttgttccctaaaccatatcatgtgcccatcactctctctatctctggttttgtgtcttagcactgaccttatttattttctttgctatgatatctctacaatagagaacaattactagcaattaaaattcttcaatacataataaaggatagtgcttgatatgcaaaataagaaatattgaatgggttttagaacttctaagaggaattttatcatcatattgctattgtttacctaagatgaatttccattttctaatctacacataaatggtatgttgtatattaggttttaagggttatcttttatgctatcccaaaatcagacagcactgtagaacaggaatttcttgatatatcatttgagatgctgggattctaaaataaagacatcattaagagtatagtagtaattcttctgtgggctctggagaaagacactctcctcttcctagacactgttagttagacattctagggctttgtggttagtagtcatataattccagctcacatatctgttgcccttgtatgtttagattgattttctattatagagatggtgagtctaatatggtgttgttcgatttctttatgatcatcttaactaaacacagccacagaggtgatatttctaaacagtggcactctacagaattaggtgcatatgcacttttgaaaaacattcttcatggctgtagagtgtgtttcctaaaatactgtaatccctttgagccaggaccatgtatttctttctactcttccttgcatacctaatgtgaggtactggatctaactttaatttaattataattttatataagtttgatggtcaaaggtagaagaaaacatatatatctgtccaaatttattggatacaaattttcttattttacaacatcacaaaataatgccaaaacctgggtgaccaagtgcacaaatgctttatcatttaggcaacattccagatttacaccataataataaaaggctagtacaaatgaaacataattgtcacacttcaatttcatgaatgatctgagagagagaaattaaagttgatattgaataccactgttgataagaatggaaacaagctatataatttaatcttaatttctttctgagcattttaaaaattagttagaatatagctatttgatttacagctggtaagagtatacattgtataattctatttacagaatccattcagatctagtaaaccagtttctgtattcactcatgcctcaaaactcagaatgccctaaataaaagaacaaatataatataatataacatttattttaaacataaaatataatataggtatatgtgtatatgtatttccctgtgtgtggtggaatttatatatgtatatatcatatacatacacacacacatatacatatatacatagatattacataggaatgtaacacaatgaaaaaaagagggtatgaacttcaaatagaaaaggagaagtttgtgtaaggttttgagtgaaggaagagaaaagtcctaattataactttaaacataaagaaaaaattataagagaatctgtactgtagtgaagaagctgaagagggagttcagtagttaagacctttagatcaaactaacaattcgtagcaagatgcatctaaattggtatcctgcactaacatatttggtgagctttaaaaaaaataaaagtggaaaagaaatactcagaaaattttgcttgtaaataaatttattttcaagctagtccctaaagcatgtatattacaagcattaatgtgctattatctgatgctctcatgaactacatattataatgcatttaagtcagtttaaatatctccaatgtacactgttttcttcatggctaaaaccatttaaaattcttaattctagacttttctctatgtagttgcacagtgtagaatcatgatccattttcatcataacatgcaatagactataagaagtacatttttatttttaactccaactcagtagtcagtgatcagggttcattgatgatttaatggtagatgacttactgtgagtgaaacaatggactactcctttactttggctaaaatggaatagttttgtatttatatttatacttgtgttatattggagtcagcattcttgacgctatgctaatatcaaacttaggagaaacattttatttgagcaacccctactaacattactatagatttaatagatcgaacacctttgaattatatgcaaaggaatcagtcagaaataatatttagtgagaattttctaatgtgaatatggcacgcagtctaacaggaaacaactttactttgcctgtacaatttgtaagttgcctgatgactgctatcagctaaaattgactgttttctctgcagaaaaaatgacatattactcacctcagaagtatatgacatgttcctttcctttctattctaatcaaagtcgaaatggggggatgactaactgaggatgaatgatctgttgtgtgcacaggggtccaccatcaaaaaaaggatcagaaattgcataggacagatttggattgagacctatgattcaaaagtggattaggatcccacgtttgccatcactcgttttctctctgatgactgttctgatctgagctaatgaatagctctagctatgctaatggaggatgcagtgaacaaagcaaataacttgccatgacaattaagccctctaactgccttacatcgggattactaaagtgtctgctgtcaaggaagacaaatgaaaactcctgtgctaaatgcatttcagctaaaacatactaaatattcttctgagacatggaagattgcaaagcttttaatattttaaaggggaaatatattgtaaatggtaagtgcattaaaaatcatcttaataatggctaaaaatcactgtaacaaaaactcaacagaaatttcagttttgatactcaataccttctagtaaagaatttccttaaagatactttctgttgtgcatatggactgaaaatatgttatttaactgtttttctttctactgcaatgctaccaacaaacttagtagtttagacaatgtgcacttgttttctctcagatttttgattaaggattccaggttcagctgaggtgtgcttcagtgtctcattagaataggactcaagaggcagacatgaaaaagttgactttgtcgaaagaatcctcttacaaagacaggaaactatatacagaaccaaatcttttactacatataaggataggggcttatcttcttgctatcaacctcagctctttaccacatgggcctctccaatcttgcaaaccagcttcagttcaattaacacaggataatttctttgtgaagaaagggatattattcttttgtaatattatcatagaggtggtatctcatcacctatccacgctaatacgtcttagaaagaagtggtcaagagaaatgggccttggctaactggaaaccttcgtaacattttattatattaaagtgagaacagtggcctttgtcttgttcatggttctggtctgataaatccaagaaaaatattgcttaatgttttgaggcattgcttcaagtataagtgtgttttccagggctttccaaaacttgattgcatggatttattaaatcaaaatttcagaaaagtatatatatatatatatatatatatatatatatacttatacaaaaaaaataactgtaggcaactgaaaaattctgagaggagggaagctgatctcacaccacactacttggatctccagtgccaaatgatcagccctgaaagcatatatttatgtaactttatatggactgaacatgttatatttagaaatgcatatgtatttatctatgtaacatgtatgcagtaacaattagtgataagagaatcaatatatttgaagaaaaccagaagtggcatatgggagtgtttagagggaataaacagaagaggaaatgctataattataacctcaaaaagaaaaatttaaaggcaaagannnnnnnnnnnnnnnnnnnnnnnnnnnnnnnnnnnnnnnnnnnnnnnnnnnnnnnnnnnnnnnnnnnnnnnnnnnnnnnnnnnnnnnnnnnnnnnnnnnnnnnnnnnnnnnnnnnnnnnnnnnnnnnnnnnnnnnnnnnnnnnnnnnnnnnnnnnnnnnnnnnnnnnnnnnnnnnnnnnnnnnnnnnnnnnnnnnnnnntatgtgaacatgaaagtgaacagggaccttgtaatgtaagcagatgcaacaggcaagaccgcatgctagagagcaatgaacaaaaatagggtccaccctacttttaatgtctttggccaccttgcagccttatgtagataatagaagatgatcgatttcaaaaacattatcatgactctttaagtgaaccctccccgactcataccagagttgaacttattcagaaactagcccatgactcctgttatagccatattatttcccaaattttgtgcattacatttccaagggaagatttaaaatatttgcatcttatttgaagagataattacatcacagcagccttttaggacttgacttcagttaaactatagattttaaatgtcacttttgtgccaggaataagtatgtacagaggaaattttcaaaatttttattttctggaaccttctgttaaagtatttgtaagtagtctgtctttgaaagtcgctatccggttcctttgcttcctatccttaatttctaggatactactcaaaatcatgtaaacattcctcaaatgtccaaatgggagcgtttccttgttttagtaaatgatgcagaagttctattatatctaaacatacatcttaaatctctacttcctggcttcactcccgaatggaccaacccatgggcacttctcacacttcatctgacctgatacaagtaacagcaccttctacttgacctatagcttacataggatgttgctcacttctgcatcattttgatacataaaacttgacaagagaaaagtttatcacgtctcacagtttcagagattgtaatccacagatgatcttcctcataccacactactaggatctccagtgccaaatgatcaaccctgaaaacatacatttacgtaactttatatggactgaacatgttatatttaggaatgcatatgtatttatctatgtaacatatgtgtagtaacaattagtgatttggggctggtgatgaggcagatattgtctgtggcacactgtggcagagcagtctgctttaccatggcaagtgggaaacagagagaaggaggaagagaagagggccgaaacagacatagccacaggagacatcttaacaaacactttctcttactaggtgaaatctcctgaagtgtccatatggccaataaaaatatgtcatcacctgcctacttagaattaaacacagggctttttgtgggaaacatttcatattttaaaattgtgcggagcaatacactgaagtggtagaattatcttcttacactgcttaaattaactctatgtatactatcactataatggattcctttgcttttgatgaataaatttatattcttcaaattaccaggtattgcgcaaccaatctagcatttgtctttagctcaaaacatattattaattagtctgcctaaaacaaagttatccagtcccttgtgtttctccttttgtaatccatcaatcattgcctctcccatttttatgcttcatatatgtttctttatcccagggacctctgcctctagcacaggctacagccactgggtgtcactgtagtacccattgtccttattacaatgtaaagtacagaggaggagctttagtgtttatccagtacaaacgagtcaaacttcatgattttaaattcatagtctgaatctccttctggggtataaaataccatgaggtattttagataatgcagtagcttagttaagatttctacggctataataaaattcatgacaaaaagcaacttatagaaaaaagtttatttcatcttataactctcacactgaagtccaatctgggaataattaagagaggaaatctggactatgaccatgaaggaaaattactttgtgacttgctcttcaggcttgctcaatctgctttttatatacccccaaagtacgtagggctatatacagcgaacacaaacaataggccaggccctcccacaccaataatcaatcaagaaaaatcaccatagcataggctctcccacataccaatataccaggggcatttttatagttgatatcctctcttcgcaaatggctttggcttgtgtccagctggtataaaactagactgctcatgcaacatgttcatagtttgcacaccaaatattgtacacagaatattatgaagacgtcaaaattactattcctgagtaaaaaaaaaatatataaataaaatgaattaaaattaaactgaaaatactacttcaaatattttcctttgcagatctcccaagacattttgctcatttactcaaattaaaattcattcactcgttcatttctttggcttgccaagagtaaatttgctttttgtaagtagatctttaaaagaaaaaaagatttttagattttgctgccaaagttttgatcatgaaattgtaaagttacatcagaacaaaattcactttagcacagagtttaaagtaaacttttctgtgagggacagaccatttagcacaatagtcaggataaaggaaagaaaaacaatggagaagacctggggcgttatctctacattttattttctgcaaaatgcaaaggaagatgaaatatatgtacacatatacacaagaagagaatgttaacaacagtgtgtgtgggaagtaaacctgttttcctggaatacaggacattttaatgagaacattgaaaagtataaatagataaggattcagcttactcagagtcattccagataaccattgaaaggacgtgaatcccaattttgaggacacacacacacacacacacacacacacacacacacaatcagaatttcttgaagaaggcatgaggttgtcaaaacattgctgaaaactgttaaattgatctattatttaactcattttatctgtttattatttttcacaaagatgtgatgcaattgaataaaatccacaagtctaagtatgcatttacaaggttttaattctcaggatttcatccaccaatcccccaaacaccacacattggctatgcagtcatttctctgcattgttctctactgtgagaatattgccttcctttgtgtctctatggatttcactgttatggaagtttcaagcaaatggaacatgaaagtcccagctggtttggtgtggtttcttctattttgtgtaagaatatctagaataacagatattcactacttttcatgacaatgcatgcccgatgatctgcaccatcacatgattccaggacattttgtttaatcgctaacgagtgtctccccaccacacacactttctagttgggatgaataaggaaacctatgagcatttgtatatgtgtgtatacatgtgtaaatattcatgtctgaacatctgctttctatgaactttttttttatgattttcttgacacatagtcaggtatgtgctataggaacacgtggagtctgagtaaagatgtagtttgcatttcaaagccaacaatgacagggttatttcatcatttgtctctctcataagcagtctaaatgacttcagaaagacagaaaaagaaacccacaggggattcttacagtgaacagtaggtggatacagggcagtgatctccacacattctttcaactgtaccaaattaggggatctttcccatcagtctctctagctattaggtaaatggtgagaggacaaagcataggattggaatgagaattaaaagtatcagtaaacatttattttttgttgtttttttgtttgtttgtttgcttgttttctttttttaaaatttattacgtattttcctcaatgacatttccaatgctatcccaaaagtcccccataccctccccccccccacttccctacccacccattctcattttttttttggccctggcgttcccctgtactggggcatataaagtttgtgtgtcccatgggcctctctttccagtgatggctgactaggccatcttttgatacatatgtagctagagtcaagagctctggagtactgggtagttcataatgttgttgtacctacagggtttcagatctctttagctccttggatattttctctagctcctccattgggggccctgtgatccatccaatagttgactgtgagcatccacttatgtgtttgctaggcccctgcctagtctcacaggagacagctatatctgggtcctttcagcaaaatcttgctagcgtgtgcaatggtgtcagcgtttggaagctgattatgggatggatccccagatatggcagtctctagatggtctatcctttcgtctcagctccaaactttgtctctgtaactccttccatgggtgttttgttcccaattctaagaaggggcacagtgtccacactttggtcttcattcttctagagtttcatgcatttggcaaattgtatcttatatcttgggtatactaagttttgggctagtatccacttatcagtgagtacatattgtatgagttcctttgtgattgggttaccttgctcaggatgatgccctctaggtccatccatttgcctaggaatttcataaattcattctttttaatagctgagtagtactccattgtgtaaatgtaccacattttctgtatccattcctctgttgagggggcatctgggttctttccagcttctggctattataaataaggctgctatgaacatagtggagcatgtgtccttcataccagttgggacatcttctggatatatgcccagaagaggcattgctggatcctccggtagtactatgtccaattttctaaggaaccgccagactgatttccagagtggttgtacaagcttgcaatcccaccaacagtggtggagtgttcctctttctccacatcctcgccagcatctgctgtcacctgaatttttgatcttaaccattctgactggtgtgaggtggaatctcagggttgttttcatttgcatttccctgataattaaggatgttgaacattttttcatgtgcttctctgccattcggtattcctcgggtgagaattctttgttcaattctgagccccattttttaatggggttatttgattttctggagtccaccctcttcagttctttatatatattggatattagtcccctatctgatttaggataggtaaagatactttcccaatctgttggtggcctttttgtcttattgacagtatcttttgccttgcagaagctttgcagtttcatgaggtcctatttgtctattcttgatcttacagcacaagccattgctgttctattcaggaatttttcccctatgcccatatcttcgaggcttttccccactttctcctctatacgtttcagtgtgtctggctttatgtgaagttccttgatccacttcttcaacgaattagaaagagcaatctgcaaattcatctggaataacaaaaaacctaggatagcaaaaacttttctcaaggataaaagaacctctggtggaatcaccacccctgacctaaagctttactacagagcaattgtgataaaagctgcgtggtactggtatagtgacagacaagtagaccaatggaatagaattgaagacccagaaattaacccacacacctatggccacttgatcttcgacaagggagctaaaaccatccagtggaagaaagacagcattttcaacaaatggtgctggcacaactggttgttttcatgtagaagaatgcgaatcgatccattcctatctcattgtactaacatttatttttaaatagagtcagcctcattactatgcattgaagttgttggtgggcgtggcaattccatgatcagctttttatggaaaatttcattttcaaagtgattgcaatgttttactttcttacgaatacttcctattgataattgattggttgatttatttatgttatcgtggatatgaagatgaattatatcaaagatcctatttattcactgggcaattcctatattctcagacaaactgatattcacattttttcagaagttttacttctgttattccttagttattgttgagctattaatgttctttgcatattctgaatataagaccaacattatctgatttgaggatgtttttttgtccattgtgcatattgcctcttcactttcttggtgattatttttttaaatgcttttaattttggttaagtgcttttcaattttttatatgcacacacacactagtgtgtgtgtgtgtgtgtgtgtgtgtgtgtgtgtgtgtgtgtgcgtgcgtgcaagtgcacgcgcatatttgtgtatgcatgtatatgcatgcatgcaccaagcccatgtgtttcaagaagctatagaataccctgatggggtcatttctttccttctgccacgtaagctctcagactcaagtcaggtcattagatttagcagcaaggactgtaacctgctgagccatctgagcagctctcaaatcttacttttaaatttgtttctctgcttgcttttgcttttagtattatacacaaagaaacactaactaattcacaatcactatgatttatactccctgtagtatcttccaaatgaaaactatttattaagatgttttattttgtttgcttttatagccagaaactgtcaccctgtaagactactacacttcttctagagttcattagtaaagataagtaaatgactttgtgtctagagccacttttcatgatgaaaatgtttcaagttcttcatttcataatcggtactgatcacagtggcttccaacacagggcagcagcacactggggtacaggtgtggattgcttggctagaatcactccaggggcagtgtccattcactaatataccaaggtacaccttggtatacacatacaatttaaatcttagttaaaacaaaataatatatggtaataaccctgggatatacagaattgctatgaaactgaatgctctaaaacataggtactctatttactctctttcatactgccattggggaaaaaaaacagcattttttttattgcatttgttttttatttctgtgtgtgggtatttttgtactccatgcacacttggtatccgtggaggtcagaaaacagtgtaagtttgtctgtagttgcagttatgggttgtgagctatgataaaggtgatgggcattgaatccagttcctctgaaggagaagacagtgggctcttacccatggaaccatctctctatcccttgaaatcacatcataacaatgacatctttaatcctctgttcaacccaagtcatatgccattatcagtagagctgttgacttggaacatggtctccacagagtattgtatttcactttcaccccaggtctcaagaattagagtcatgaaggataatgtatggtccttctacttattagctgtgatttttaagttacatagtcccaccaagtctcttttcctatgtaaaaatgcaggcaatgatacttacctgtttgtcagtgaagccaggaggtaaaccacaatgaagagcaggtatcccagcacatagaacataatgttaactagggtactggcataaagataatagagaattaataattttagaattataagcacaaatcaaccattgatatttttttccaaggaaagaggctaacacagcatggctagtttatgtatctttttttttttttaaagtagatatgatgtgtctgccctttattcatccaactgagtgcctttctggtctttcctctttagagtgaaaaccaaaagccaccagcagttccctaatcctgtgtctatttcttcctttatttcttcagtctaaggagcaatggctactacttgagatgagaactgtggattcagagtctacttgaaatgtaccatctggttggttacgtttctctctggggtaaaagacacccacagggtgctctttgagtcaccctttcaaaggcacactgcccactgagtgaggaaaatatttccagacggaagtcaccaccctcagcaggtggagtctctcttttagcgagagaaggctaatctaggctggatggaaagttttcaggcccttcactccactagaatgtctgattgttcccaccagaatcaggtgaacttcgcaccagccttctctcatctcctcaactctgagcgagcacacatctttacttgaagtcagcgggagcgcccggagaaagaggaacatttggaagtggcagatgaaaggctccagcatcaactcatccttctgtctccatggtctggatgactcttcctattcagtagcaaatgctgagaagtaattatctttccactagcttgctttaaaatgccaggaggttataaatattcccctaggagtgaaacagcttggagatataaaacaggaagtgaacggaaagggtgggtgaatgtcttgtgatgccaacctcgaattacaggacacaagctttttatttaaccagtgaaggtgtcttgattccctcttccaactgaatgaagttgaaaggaaaatttacaagatgtcttaaagtgctaaactatgtgagtaacataggggaccaacctttgtcacatgataagggtaatgagaataaataaagttggtgtacagtcctgaccaataaataagcaacaatggggaaaatatcaaatgagcaataattttcaagaattacttcttgaaatgtatgaaaggatgttttaagcaaaagctctagagaaataaatgttaatgagctacagaaaggctcagtatttggaagaagaagaaagacaggtctctagccttgtgaattacatagtgctggtcagaaaatactgtatcattttctgtctaaacagtgataatgatattgcaagaaacttgtgctgatgtgtcctcatccccatggtacataatgtaaaattacaggtgaataaataaatatttccttcttttctttcgggctattgtatcaatgcattctatgtaagtttttgttccagtaatacttatttgttaatctctttttcaaggttctatggccagtaccaggacctttagcagtattatgtatgtgttttacgtggcttatttttgagttctcgccgttttcatttgaagttctctgaccctgatgacagttaaaatattggtttccgctgtggcaacctcaggaagtcctagattggttctaaccgagaagacatgactattgcttacaaatatggagttaaggaagaagtcaaaacttacaacagacatttgagaaagaatctgctgattcagtgtcatagcatttacctccatgacgaatcatgcactaccaaccttaaggaaatctttgatgtatatattttatcaccaaagagtcctacactactaaagtcaattgacctcttgatgaaggttcatccatctagaggagatttaatatcttttccctggaatcctgatttcccagtgacaaacacacaaagtgacatggattcttcttaactcttaatgaactaactgatcttttcatttctttattaaaatgcatattgaatgcctgtgtgatttttgcttcatatcttagtcataaacaaatatttcaacactatattttactttgttcttgtaggcttgtaatcccagctatttgcaaggttgataaagaaggatcatgaattcaatggttgtcttgtgttacagtatgaattctaggctagccttaatgactttctcaggtcctatgtggtgaggtgggataggaagagggggcagagaaggatagaatatattcctaggtactgcatttgattaacaggcagggataccccatgtgatctcagtaatgcagaaacattaatgatgatattgtactgtcagaaagttgttgtggtttacagctacatgtctttattctcactccctccatctgcacaaaggacataagaataggagtgtttcctcaaagtttagtaaataatgcacaaagccacatagtctgacccacagcaagatggatataaaaggtactgtattatggtccatttttaaaactcggtggaaggaaaaaataattccagcttcctcacttagtaagtctgaagaatagcagaaatatttactatcttccaaaacagacaacactaactacagcattttttgagcagaggacaagaagttctcttcacaactcaatcgtctcttctttctatacacaatggtcttgtgtgaaggcaagaatgaactaagactcttttcacattccttcctatgatattcctaggtggaatgagctgcattatgctaatgcaatcccgagcaattatgtataatcagaatgaactgtgtaatcctaatgctcttccaggcacttatggactaggagaaagaaaggatccacctcattaggttaactattctgattcacatagtctttttattccaaaagagatcaattgtacacaattttataaagtttctataagcattttatagagccaagaagtgaaaatccgatggctgctgatcttgagcacagtaagggacaagctaggacctcttttcatctcctgtttcacaactactgtctgtgctgattagaaccaggtgatgtctttccatgtgttaagaactaaaggacagctgttcacttacttcttatcttcccatggcccatgatttctgatgaattgtgtatttctaaattcattccttcacacagggcagaaacatttatctaaagaaaaacaagcatctctgtgatagacacaaattaaaatgggaaatatgggtcagtaagatactccaactaagattctactgcccattagcaaactggatatttcattacagagctctctggagatttaagaggaaaaataatgtgggtgagccatagaaaaatattagagagaaaatggtataaaaaggagctttggggaggtggagagaccagagctgtggcaaggaaatgtgcattagacagtgaattatgtttcaattttaatcttcccacctacattccttatgctctctccatgtggctcatttttgctctgacttttaagtgaaaaaacttaaaattgtaaattagggaagatcttgttttgtgtcggagcatagttaactgaggaggcacagagcttaagactcactgattattctgatcatatgacaaatggacctttgagtaaatccaggggtgctgcacctgcgttttattcccataaaatgcctttgcaaccattcagaagcacatgataactacattctgggcatttcaggaacacagcagatgtgcttccgtcctggagcaaggaccccattctgtatcatagaggaaaattcaagacaaagcaaagagaaagcccaagaccttccagtagcgacacattaagtgaagagagtatagctacgtatcctctttcatttaggccgttgtgttaggcaatctaagtaaataactgtattgttcattttccttttatctttaatattattattctgttttggtgaggtgcccatgccacagcatgcatctagacgtgagatgacaacctgggaagattagtctcccccccctctcctatgagttcctggggtggaactcaggtcactgggtttttgcagcaaatacctcctaagccatctcatctgacacagttttttttatcatatttttattggttaaattattcatcaacatgatgtaaatgttaaagactgggaaatcaaatgcatataaaatctggaagcttacatatatgttaatatatggtgttctgggagttataactatgtggatatgtgtatttaaatgtagaggtagagaaaagtgtgtgagtctgagggtatgcttcttatcacacttggattctgagtgtaaatatgtaagtggggatatgagaatatttgaatgtataaataaatttggaattgtatgagtaggggagtgtacaagtttgcgtgcatgtgtatgtacgtgcatatgtatatatgatttgggattgctgtaatttctaaatggtataataaagtgataatgccttgtaaaatctaaagtggcatttaattctacttcatcatgatacactcttacagagaacacacaatttaaaagtttaaaaagtaaagcagtgctttaaggatatgaaaaggcagaccatgaatttgtaagaaagcaagaggggaatatgggaggtttggggggaataaacgaaaggagaaatgatgtaattaaattataattttaaaaaaagatataagacacattagctccttagaacttcagtgtacattcaagggcatgaaatatcaaagaagattcatacttacttagtcagatggaatgcctcctatagagttgagtcaatttcagaccttttgaatttctaaaatgacattttttttgcttaaattgggactgttttaaggaaaactatgtttggcattttagtttcagattgggaacttccgaatgaagctgattattttccttaatgtaaagcttttcttttgcccatatgaatgccccaaattctaatcagaggttacactgtccagacagttcccacaatataatgttcatttctgtcaacaattctcatgcagactgctcttcaaaggacaacaatgaattaagtcaataaaactttgactaatttatggctacaagtaaaatctttataaatttatatgtatgcatatttctataattagaacttgtgaaatccatacagattccagtaaagcttgcttattatgtgtctgtatttgttacatttctgttgttggggcaaaagcaaaaatagcaacaacagcaacaacaaacacttgaccaaaagcaacccagaagaagggtttctctcggtttcttgttccagatggataagagtccatcatgggggagaagcatggcagtgtgtatcaggcctagcagcaggaaggagaagctgagagccacatctcaaccatgagaacaaagcagagagagcaaacaaaaagtgacagggagcttttaatctcaaagcctgtcctccagtgatgtacttcctccaacaaggctacacctgcacctcccaaaacagggctaccaactagaaacagagtgttcaaatgaatgagactgaggtagcatctctctttcaagccatgatatcatcctgacttgtacaatacattattgatatttctttcaaaagcttgatagcaggcaaccataactactttgaggtcaagactcctccatgccagtgatagcatttcacagccttccctcctatctccttgttcttacttcttttcaaaccctcttgatgatgacctatgagccctagaagggatgacgtgagtatactgttgtgattcattatcacttactctcagcatgtagagcagacacgtctttacatttattgcaaacagacttcttccatgagttttaaaaaaacaaaaacaaaaacaaaggaacaaaaagacatgaatgtgggaaagaaactagtggggagatgttaaactagtattagaggtaggagagacattagagaagaagggcactattggagtcagattgtactttacacaaataagaaaatttccaagatgaaactcaataaaagttataaaaattgatagcctttgttttgagaaggaaacatatagaagcagacctaaaattttatatagaatacccaaggaataaacaatcttctcaaaacagctcaagtatgagtatacagaggtccaagacctctgaatattctctctagccatctttaaaactccttcacacaagcagaaactgaggccaaaatatcaatgaagtcatagatgccagaagagaaataatagagcatactgagctatgtagcaagttgaaagcccacaagccatctactttcattgagtcaattgaaaacagataagaaagaaagccagggcttttcatttcctgtcaaaaggaatttaaaatattcattgtctttaattttaaatagtgacaaaattatttaaattattaacaaaatgttggactagccagaaaaaacctaatagttgttcacttttgattatacattgagatttttgtctctctgtcaaacatatttcatatgttttctgatggtgtcataaataccacaaatattccttaagtgtggcccatccaaaacccttgcccaagctctctaaaatgcacacaggtgagagtaagaatgtttgacagctctgaattaaataagcactcttaaaataaaatacagatgaaaaatgtttctggagaaagcacttaatagtagggaaaaaaaagaagagcaaaacaataaaaacactgctttgagttctctgaaacttacttcaattctactatgttaactagcctggcctggcatgcagtgtgctcggcttcctgtggagtccatgactgttttctgtatagttgctctaaagtctgttattagtatttgaggagtgatgttagggatgcttatactgcactagggaacaccaggatactgtcaaaggagaggaagaagaaaagcaggtgtcatgtagaagctactgcaattgggaagacttccatatagaagtcaatccagatacagagatgactgacagctaaggaaaagaggaggggtacagtgggtgggaaaagcagaaaagagataagttaagagagtaaagagatatgcagagattgtctaaagtgatttgacaggatcattggtgagggcaatcaggggcaagctgatgatcacttgggagataggcagccaacaaattcaatcatgtattaacccaggaaaggtgaacataaaaacttaaagtttgaaatctaattaaaatgagaaccagaagtgcttgaacacagctttgtctaaaagagagtgaaatttgatggcaaggcagagaatttaatttggtgcctcttcaaatctcccattactatgatggctgtgccgttcaggggaggttgccttccagctagagtcttcacagtgttagtggtctgtccacacacagcttaccctatgtgtgaaagcatccagtgtgttcaaaaagaacagcatgtttaaatactattctattcgttcccttgacatagtttagggacattatttaaaatttctatagtcttctctcactagtaggtacctatcacaaaagacatgtaacagaatcactaacagaagaatgacatcctcaattatttaatataagttttcagcatagaggtgctcttatgaggaaatgaacacttaaatacttaagggagcttgtacatccttaggccagtctgcaaagagtggacagtgttaggcatagataaacagaaatgagcagggggccttgacaagttctatttgttctgagcttattgtttctgtgtgttcaagaaatgaggccacttctttgctcaagatacagggaagacacttagagaatgaaaactctggtacctgctctggggaaggtcgcctaggctttatattctcttccaaaggagacaagatgagggaaaggtgacagtgacctcaattctaatgtgttctcaaatgccatattctagggtcctgtatcccaatgtccactgacatttgcaattaaaataatcaccttcaattgtgccttctttatacccaatgtgtatatatgtgttcatgtacatgtagcttatgggaataaatggacacttattctggcatgtatgattggactttgcagcctaccattgtcagtgttgctagaccttgtcttacatatttcatatctctccctctctctctctctctctctctctctctctctctctgtgtgtgtgtgtgtgtgtgtgtgcgtctatttccttctccttagaaaatgaacaatcagagagaacataaagcagacaacacaaaataaaacactgatttctttgtagtatacacatggtgtcaaacatagaagtatacaatagtaaaaggtctccctaaaattaaatggattgtaggaggcacataaagtaagaacaaggcaaaggaaattcttcacccagggaatttagaacctagtgggaaattagtattggaaatgtaaatgaggttagggaaattaagaggattagctggcttacaggggtttaaataaaaataaagagaagatcacgaaaagcctttgagatttgctctctctcaacagaattaaagtagttttgttcgtgtgtgtgtgtgtgtgtgtgtgtgtgtgtgtgtgtgtgttctgttgtcgctttcaatttgaaagtatttgtctagaaattctgaaatgctctcagagttgttttattactaaagctctatttgccacctaaagccagaggctgacagttgaagaagttagcttgcatggttattcttttgtgacttgtatggctattgattgtgatgggctcgaatccaatttctactttttggatttttcagatagagatgacattttaagtaataatttttatgtatctctcaacctgttttggcaataccttgtaggggagtggcatggggaggttaaacaataattgagtgttgagagttgggtatattgaacaaaaattgcaagttattaatgagaaagaaacaaagtatgaacaaaaccctaggtgtatttcagtatattctttgagactgaatccatccaccattaagtgtctcacatagctgaagaactaaactgggtagagtagatgcagtacaaaagtaaatgccgtaggggctgaagtaatggtttacatggtaaagtatgtctgttccatacttttattctaaacaaaaatggggtatggatgctaagatttccagtcctgagagaaaccttagcctaccagtaaggtaccaggacactcagcactgtggtttcaaaataaaaatgtagggggaatcccagaatccccaaaacaatgcagtgtctttcacctacatttggttgccatctggaattagatgggaagacctgattgctgagatcccacatgctttgatcacagggtatgacaagtctagctggtactgagctggcagcatcctctctcctggctagtttacatggttctcagcaggttctttgaaggctgctggtagagaaaaatcaccaactgtattacccatatgagaaccttgccaaatacaatagtgactggtctggcataatatgtccaatggaacaagaatgcaatgaatatcaggggagtaagcaatagctttctaattgtacttaggtcctgttttgtaggggagaattcaagcctggtattgtgaacctgacaggtcataggcttccctaccattatttcattaaagtgacatagtatcaaactaccttcaaaatatttatcctttatatccatagatcatagagctctcatccctcaagagaaaattttatgtagttgatggcagttaattaatagacttaagctatcaaagaacagataatattgaactggagttggtagccctgactaggacatctatttcctatctcatctacctaaggttcaggaaacattgtgaacaagatggcagaaagatggtaagaactagaggtcagggaagatacttcaaaataatgtcttcaggacatggtaaggccaagggactcacaagggactcacaaaatctgaggcttccagtacaagacctatttaaaattaagccagccagcacttcagatgagaagctattggaagctgttagttgcttcaggaggaaattttcattttcttcaacagtgtagtccattgtagatttcacatgctccacctaaaggtaccttatacctttaggaatatgagcaatattagttaaagtaaatcagttgcaaaatgaaagaaagaaagaaagaaagaaagaaagaaagaaagaaagaaagaaagaaagaaagaaagaaagaaagaaagaaagagagaaagagagagagagagaaaggtgatctagagaagggaatgatggtaatagaattgtagggtgaatattatctaagttcattttcttcatgaatgaaataactgaagggaaaattattcaagaatgagatattttgtgcagcttcaaaagaatatcattggagattaccttctgtcttccatacatacttctttaaatgtgcacatacttacacaccaaacatgcacttgcacactcatgagtatgtatccccacatacatgtactccataaacacgaattcacacatctgcacagacatacaacattaggccttgtgaattcaagtgcaattaaatattaagatattcaattttttctattgactctgtcttttcttcttatatgttttctttctttacaatttcaaatgttatccccttttttagttttccctctgaaaatcctctatcacgcccccacccctgctccccaacccatccactgttgcttcctggccctggaattcccctacatgggtacatagaactttcacaggaccaagggctactcctctcatgagccatcctctgtcatatatgcagctaaagccatgggtcccaccatgtgttttctttgattggtggtttagtctttacaaaacaagcccatggaagcagaagtaaaatccagcaatgtaattgaattttatatctttatttatttatagcatcactcttttattaagctagatttttctttttcataaacatggacttaaaaattattaacaagtcactttttttcatgttcaaggaagctctcatgatgttagtcagcagattcacaaatattgtctgtccacaagacttcacaagaggttctaataccttctttcaaccttttacctctaatattagtaatttatctttaatgtggtctgttggtgattttgatgtgagcaatatgacacagatgacctaagagtatcacacacaggcttctcagagccttgccgaaattccaggtattgcctttaagtaaagttcctccaggtttgtttgggaccaacaaagctgaaatactggcctggttcttctgagactcagaggactttgaccatgtagaattcctagtgctaatatgaggccactcgtgtgctgagacaaagctgtcaccaaggtgcatgtctggaagcttaatggcagaggtaaatgctatgagacaaggagttatatcttcagctcttccactgtccttttcctttctgtaagcctatgctcctctgtattctaacaaatgcctaaataatatctcttctttactgatctttttctggcgccacattatgtctctgctccgtgctcagatttctctgagactctggttaatatagctagtcatctcatcttcaggcggtgccttctttcttctatctgcgtttgagtttttcagaaccaatttcactgtaactgacctctgaagtgaccccaagattcttttttttccattcaattttctctatgatgaacctaagtaagtatgacaagcaaggtaggtcttatgctgcaacaccctctatccctgggttgacgagatactcttaagactgaagctttgattaggggcagaggacagcaaatatatgaaaaataaatccatctgtgctgagcagtatgttaggggcacttcacattatcaaataaatatgttatttccagtgccaattgtaggcgatgggcttcataaaatgacagtatttctggaaaataatgttttacctgtgagtgatgactgaatgagtaaatgttaatagtttattttgaagagccaaatataattaatttgataaattctcagctaaaatggacaaaaactgcattaagcataactaatttatcttgaattgaagctgttaaataatagttctgtgcatttttatgtctactgttacccaaatattacatggttaatgacatctgtaatacctactgacagaaaagcactagatttcttttgcacttttatgtatgttctgtgaagaggaattgggctgtttagaccttaaggaactgtcttgggagaatatcagaaattgtctaacagattccatgataagtagccaatatggcaaatttagtgacaacttttattatattctgttagaacaattgtcaagaaaagtacccatacttaatttcaattaaatgcttctctcttagaacttatggggaactgtctatttgtagcaacatatttacgtcaattgtggatcatccgtacagccagatgggcgtgaattgcatggtgctgggtggacagccccgctgatattactgctttacagcatacttctgggtgcttcttcttcttcttgacagttcaggtgttaaggacctcgactaagcacacaattgatttgtgctcctccctgaaagggtctagaatcaatctgcagtagaaaacttcagcttcagtaggagaacttgcagattttgagaggtgcagacaactgcagatccccctaaagttatcactgtgaatttcaaatggcttttttttttattgcagagcctccttgaatcccttctcaataaagaatttgacaacccacctaaccattttgtacaaaaaggcatttccttttctgcaattagatttttctcttcaactgtttcttacaaggtagtgttctattagcagatattgttcacacaaagcaataggtttcattatgatatttttcgtatatgtacaaaccacactgatcatatttagtgcaatgaattttatcctctttgtcactgttactcctctggatgatttgcctactccttgtctcaaaaatgttaaacttctacttttgaatcatatttcaaacatctatattccttcatagaagaactagcccctctgagtttagcttactttatttaatatgacaatctctaccaccaccaattctcctaaccatagtataagagtgttctttatggctcactaatactgtatcattttatatatgctacggtttcttaacaaaaatgatgctgaatgtttcggcaaactccagtacttagaattaacagcaccacaatggacatgaatgtttagattgcctggctttgagtcctttaattatatgtcaggagttatcactggataatatggtagttcctctacctttgaagctttgataagctttatactggtttctactgtaactataatttattataggcaacactataatggcagtaaaagtgagtactgttacccgtgcctaaagatggtatgcagtacacttccatagccagagcagtgtgctctgactacaggagagcaaatgtgtactgctgttagtagatcctggcttcctggggagcttgctctccacattgaagtccatactataaaccaattgatatttgaatcctaacttgtcatgaaattaacttttcctcccatgcttactgtaactagtgaccacccagtagaccattcttgagttcacaaagattcccactgatttaatatttatttactcccttcaaagtgctgatgtggggtcaaccgaggtgtatatgcatgctaggcttaagttctgtttctgagctatatccccagtatgactcatgtacataaagatggctctctactactctcaatttgggcaagctgtgtggtatataaaacacatgttagatacacaatatgttaggtgaatacatttctgaagctatttatccgctggggcacttgcagtacagaaatgaagtgacacagtctcagtttgtgaggctgcagaccaaagggaggcatattggctgttttatcaaaccctctaggtgatagcttttgtagtaactgtgggcaattgctttcccatctttttaaccctgtgcaaacagctactaatcatctataataatcagtcctggtagagagtctttctgccttaaagaaactcagggagaataatgaaatgatttatctaaaaagatgcttggtatgagcaatatcttgggaaaagttctggtatagtaaattatatccatgcttcttaggttttctctagcaggcccaatttaagtgatgtaagaaaaagagaaaaggaacaaagaggcacaaggtgttcaaagctagaaaagattttagtaataaaaaagcactttatgctggtttgaacctagtaagtggtttcaaatttaaaaggaggtttacagtgtataaaaatatataactctgtgtgtgtgtgtgtgtgtgtgtgtgtgtgtgtcatgaacagctccataaaggtatataatgtggacaaatatacttcattctcttatactctgatacttaactttttatacatattcgcatgcctaatttatggaaggaatttatcttgtaattatatgtggccctagaaaacaaaggctgctgttttaagggcttcctcgagggacggatgattcagctattcaatccatgtcatctctgtgtttgtggtagtgtttgatggcaagaaaggagttatgattgtcactttaacatgttccatgacttttgctcaggagatttatacaatgtcagggaatcctcccctccctgtatttctgcctatgcctttgctatgctgaaagaaagctggtcccgcagggtatcattgattgttatgatacaggcctgagcatgatcaaacatcacagttcaggaggcttgtcgctttcttttgaagctgcttggagtgaatggctctcttattttctcccttagtttcaatattttaactgaggtctcctgagaaataacacatcatgcacaggtcaccatgtaaacatagtgaattgaaaaatatagagaaagtggaccccactgtttgcttcacaactctgccctttttactgatgctttttgtattttgaattgatactcaacattaatttaaaaaattaattatgcatatattacaatcattatattgcaactttaaagaattatggatatgtaactataaaatcttcataacaggttgcagtttgatggtgctgcttatattcaactttctttcccttgtagttccaactcgaatcagtctacaaactcccacctctcctcacagtcctgttaaacttagcccttcttggtacatattgcatccttctttctcagcttatctggggatatttgatcacccccatacatacaaatattgtttattcatttgcaattttcttctgcaaacatagcctgagtgcttacaaggtaccatgttattctgaattacaatgggacttccagtgattttctgattcattttttaatcatcttaaactcagagaccagttctgtcttgtcttctgagtcacaggtactgtcaatgtcctagaaacagtagatatcaaagtattagtttaccatgatttactagtggatgctatgggatagtcttcccatctgtttataggggtaaatgagacaatgctctttgtgtttctggaaggacatctggtttacatcattaacaaatacagtttcattcaaaattaccttctgttttgtttttcaattagaaacattgtcatcatggaaccatagaaagggagctaaaactataacctacataaattaaagccctaaagtcataggacttaactcagcagtggttgaacaagatgttgtgcttaattgttttattagttagcccaatgtttgaaaaggcatagaaactacaggagcatgaaaattgcttactatggctatggagattgtgagcttatgttcagctggaatgagggatgacccaactaactctctggttttcaaaaattgcaaattttgttggtttgtctactaaactgtggtttgactgattgccttggtaacatcggatttagatctactaaactatagatctaataaatgagctcttttattcattttcaaaagttatttcctagttataaacacacaaacacacacacaccaagaacataataatgataatcataaaaattgggagactgtggatttgagagtgaggagaacatgggaagagtcagaagaagaacatgcaggggaaagtgacataattctatttcaattaggaacaattttattttaaacatgagaaatgagaggataaaagttcatcatgaaaatatttattagctatgttctataagcatatatgcacacatatgtacaaatgtacacacatgtatattgtatatagttctatagtactgaatctaataatttaattcatatttgcatatgtagagactctttttcatgctataaaatacattaatttatacaaaaataatacctaggtaccattcaaatgtgtatggacatatggaaaaagaaaaatcaaagtagagagaattttacacctctgtgtatattttaaaaatgtctcccctagttaccaagccatatattggatgttgaaagagctggtccatcaaggcatatttaaattgactaaatgacagagtgatatttgaaattggtcttgttgtatggtaacctctgtttgtctctctctttgtctctctgtctctctctttgtgtctctctcactgtctgtctgtctctgtctgtctgtctctgtctgtctgtctctgtctctctgtctctctgtctctctctgtctctctctgtctctctctgtctctctctgtctctctctgtctctctctgtctctctctgtctctctctgtctctctctgtctctctctctctctctctctctctctttctctcttctgctccctcctggccctcaatgtggattctttttcttctttgacagttctatccaatgtgttttgatcatattcatcgtggccccattgaacactctttccagttcaaactccactactatcccatcaaatattgccccttttccactccgcataggccaatttatattgcctaaatatttttgtatatgtgtagaagaattttaatctagaaacatagctgttctggcaagggatcacacccaaagaccttctagagctatatgatccaaccagcatacagacatgcccttagcatctgacaaaatgagtcagcaaaaggatgctctcaactctcaggagaacagacaagagaaatattacttaagagtagtacagggagagaggtggagttgagttcatttgagttcaatgcagttctgttgaatgccgtctagttgagttcacacagttctgtttagatttagagttcagataagtagagcaattcagtcacaagctgaaagaagtcgcttgaatcaatcagcttggagaggagtttgaaccagaacagccaactttagccagccagccagcatttagagagagctaaaaagactgaggttatgtagcagtacgtctctgaggctgaaactttctaggcctaggttagcagacagaggctggaacctgaaaccttcaaggtcaaggcttatggactattggattgtatggctactaagagcttccaggtgtaggtctagggaaaattagatagagatgctctaggctcagctcaagccatgtatttgtaaaacttggatatggctcttatctcataagaaataaagagagacatttatagatatgtggtctaacattagagtgttaacaacttggttaagttaggggctacattctcagagaaattgttctctttttcatccagcagcagggcttgtgtgcacaacttctttctctatggttgatttggtctggcttgtgcgtgatggggctttgtacatattggctcaactactgtgatttcacatgtgtagctggcttgatgtgtccaggttacatatctatatgtcacttatagaattaatgctctttctaccccttcctgtacaatattccttgagcgtggagaaggtgtacagtgcatgtctactctttagggatgaatattctggagccttttatgctctatactttgtccagttgtaggtcacaaagttactcaccatgtattgcaaataaaagagtctcagatgaaagttaagaggtatatttgctatggtatagtgataaatcttaggaatcaagttaacactgtgttcatttaacaacttagtagcaataggttctcccttcaagtttatgacctctttagccttacattcttaccctaatagcgacaggatgaatttcatgtccgattagatatttattggttactcctttcatgtttatgccactacaaagattgcatagcatggaatcaggagcatggaatcgtccctctcatacatgcttgatattgctgtgatggatgactcaaggatgtgttgttttagggtctgaccaacaacatttgaagtgtaaacaggagttttggcaatagcctgttgtttgggaggatttggggacatcgctggtcaccaatttcaaaagaattagctcattcttgtcactgggctttttaagacttagcctctgatatcaagtagggaattatcacatgttatagtgctattcaactttaatcctttggatgtattatgcatgtatggaagcatacactgtagtaggttttcattctgtcctttacaggaagttttgtgcatttgtctcaaaagctaaatttttgtctttgaaagggaaagactaacactatggaggataacattaagaagaaagagatcacaagtaaaatagataaatgcagagaaagaagtgatgttgctagagggcaagtagaaactttggctgtagaaagagaacaaaaataattagagagcccttacttcactggtaagacaagactagacgtaaagttctttccagaagttctctctgaaagaaaacttttcagagcttgacacttgtcaatgtttgtaggagaaaaataatcagtttatacttgctggagttaattaccacattacttggaaaatatttaaatatttatatttgaatgacagaatataaactactaaaaatatgatcacaatcactttgttacaaatcttggtgattctaattaactatgactgatttatttttaaatatgaatttcaaaaaccaatagcactatttctattttttcctagatcttgatgcaagcttaacaccactgaacagggacatcccttctctcacaaagcttatcttccagacattggttcttatctttaatttaaatatttcaagactgctattttagtttgatagtgaatactttaacttctatccactgtgaacaaagaatatcatgccacgttattgcataacagggtaagaccagtgaaagttaatttgatactgttacaaccagcataattggacagatgatgtagagctcagtgggagggtattataagaacaaatatgaaaactgtatagtccatgacagtacgctggttaagttatcaacatttccattaaacacacttgtcttggaagactgaaatagtgtaaatattacttaaactcttcctataatttgtccaatatttttgaaaatatgtatcttaaaataaatttaaaataagaaatttatatttattcatgaagaattatggtcagtgacaccatgtattataaaatcttaacaataaatcattgtgataatttaattcttcttgctaaacaatctttgcttgctgaccttattagctgtcagtataataagacatacgagtgcattatttcataaccttctgactgctaagttttgaattgttttttaattagcattttaattgctcatcagtgtaattgaagacagagccagaaaaaggagtcttcactaatcccttcggaacctatcaatactatactttcccaaggtcaagtgcctcctgaagcattagcaggagcttattgttttcaggcctcccagcaaccacatggtggctcacaaccatctgtaacaagatctgactccctcttctggagtgtctgaagacagctacagtgtatttacatataataaataaataaatctttaaaaaaaaaaaaagatgctgcaatttaaaaaaaaaaaatgactaagtagcatgcctgggaagggggatattggccttcacttttattctttcaacctgttgtttattgttgataaacaaaaacaaaacaagcaaacaaacacagtagttgatgtttatacaatgaaaagtagggtggtcatgatgagttttccatttctagtaatcaatgcgaagttaaatctagcacctaatatgttagccatgcaatctactgggtggacattgaactacatttattaaaagaggcttagacatgaatcacaccatcatttacacagtttttactgagtggcatccatctcaccagcacaagagtgacagaagcaacatgaatgttttaattgtcaaaagaaaatcaataagcctgtttcaaagcttaaataagaagccatttctatctcattaaaaatagtgtataagcagtttgaggctgtaactaccaaatgaattttatgacaaagatcatacattgcaagggctacacatagctactggggtgtaaagcattctggttatcactcattcactttaggactgccagttttctcactgaaatactcagataaaaggttgtctctttaaatatcccaaacattaaatgaactaattcttttgacgttcttaaaactatccttttaatagtttttacagtttaacaaaatactttattttgtttctatattaagaaatagaaaattatttcagcttgaagtccacaatattagatcaaggttcatgacaaaaaattttttcttaaatgtaaacacatttttttttttacctctggagttccaagacacttcaaatagattctaaaatatatttcattagatcattagattagtaatgagaatcaaaacttaacatttacattttcaagtcacacagttgttttgcaaagtaacagtggcaaaattacagttatgaagtagccacagaaaataattgtatggttgggggtcatcacagcatgaagaaatgtattaaagggttgcatgaggaagactgagcaccactggtctagtgtcactaatgacaggttgcacacacaaactaaatcgttttgatctttgaccgaaagaaaatttgcacagttctatctgccactctttgcctaggtgtttattcatcactaatgacctggtgtaggttttcttcccacagtgcagcaggagctgcatcccagtaactgaatagagaaggagcgcgtggaaagtcacagcccaggggatatatttgtccagtcagctcaaagttctacagaagagatcattgctcacgctgcatctaacacaagtaatatgagcacaggggtaagtttcctcagaagagctcaatttctttaagaataaaaacttcatcaagactgtgacgaagcactatcacccaatctctctctcaatagctccttctacatacctttgcttagctacgtctgtgtatatctaaaaggttaatggttatcagcacaggcatgaatatgttataaaattctaagtttatgaaatttaaaataaagaactattactataaatactgaggaaagcatgcctgtagagagttaagataacaggaggtgactattgattcaagtcagcatggattatctagacatatgctgtgtacagagcattataccagcaccatggagacataaaaaatgaagtatttgattttatttcagaattttcaatagaaagtattggtacaataaaagcccttatgaaggagcacataaaacttttgattcaaagattctgtttgttatatggttatgactcataattcattatgtacacaggaaaaagaccttggtcaaagagaaaagtagagagtagacagttttgggaaagaatctttatgcctgacatgactcattcaaaacaatttttttcagaaagaaaggaattaaaagaattgaccctggcagatattgtgtgggaggtttttttctgccttttaaccacagtaataccattctatctcaaaggagttggtgtgggtggtgtgcatcatataataacaatatatggtagagtggctataggatgcatttgagaatgagggaatatatacacatatatatatgtggaaaacatgtttttaacatttgcatctgtcaatgactaaccatcctattctcatattctcttagaatttgatttagtcattctatttagcctcagcaatattgcagtagtttgagtaaattttttattttcttttccttttgtgtgtactcaggactacagatagaattctgacttctctagaacaagtcagaaaaacttgaagaagaaccttctttatttcttctagatattcttttcgtaaatagaagttagagaatccaaacaaaatgttcttaatcatataaacattctcacacacagtgaaacatacagacactgacaaacacccattagggtagaaaactaaatttacctagtcatcatagttttcttccctattgtgtctgagagcaacatgcattaaataaagaatacaacagggatttaattataaattgaaatgagtgctatgaaggcgaagatcagatagctctgcaaaccagactagtttgttaagtctcagaaaaaaaaaaacaaacaaataaacaaaaaaacctcattgaaacatggagatgtgcataggatttaatcattcaataaggaaagaatgctccttattggaacaggaagcaactccaatggagaatttgagacgttctttgaactttagttgtttccaaagacccaagtgattaggagcctgcaggaagaaaagagtgcactgaaatgacctttgacaaataggtgagtaaaccacattcctgtttctttgacaacatagcattttatgggttactcaaagcagaaatttgttccacatttctggaggttaaagatgaaattatgacattactaactgtgcttcatgaacaattcccagcctctgttcctctttcctccttctctcctgccagtggttattgatgaaatactgatacctggatttgcagatccaatacctcataatattctgctctcccccaaatataatatttgttttcaaatggtctttactgtctatctgtatctatgacttttctccagtaattacaaggatactaagtatagtagattaatcccttcgttgatcctacctcactttaattttcatcttaagtactttnnnnnnnnnnnnnnnnnnnnttatgacattactaactgtgcttctgaagacccacaatgtgagggctcccccacgttctgactcaggagaggtgacaccccaaaatcacccacaagaaaacgggtcttgctgcaaattgcaagaggatttttattcaagagcgctctcgggcccatggtcatacaccacgcaggggtagaggacccatggcgccccgagtagctgggtaagggggtatttaaaggaagaaactgaaactcaaggaagtggggagggcgttgttggaagataccaaagataccagttaagagtcacaaggaagtgtaaagttacaagagtcacaaggaatacctgataattgttaactctcaagacagcttctaagagcctctaacaatagcacatttgcattgcaggttctggtaatggtcagggtgactttctttgaatgagcactctttgaacccaggaagcgggtgcgtagaggaatatcgctatctcttttatgattagcatacctttacaaaggccacattcccaagcctgggcctaaaggcctagaattctgtttttacgttgttatactttcacttcatgaacaattcccagcctctgttcctctctcctccttctctcctgccagtggttattgatgaaatactgatacctggatttgcagatccaatacctcataatattctgctctcccccaaatataatatttgttttcaaatggtctttactgtctatctgtatctatgacttttctccagtaattacaaggatactaagtatagtagattaatcccttcgttgatcctacctcactttaattttcatcttaagtactttttgaaataacctatgtatagatatatgtgatatctatctctatccctctatcactatctctatcatatacatatacatatacatacacatatacatacacatacacatacacatatacatatacatatacatatacatatacatatacatacacacacacacataaatatatatatatatatatatatatatatatatatatatatatatatatataaaatgttcatctagggggactctgatctccttccctagaaaacataacaaattgaatatacaagaaagccaaaaaaaaaaaaaaaaccaagccaaagagaaagtgagagaaatagctttataactttggagtgtgaggggttctaaggctggagttccaccagtgagactcttgaaagaatatgttattaggatgctaagtccatttgttttacctatttgtcctgtttagttaaccacctgggactttccaccatttctccttggaatggtttctaggatcactgcctgccacctaagcaggtggcttccacatttccaaatacccaatttaccactaattcttccttaaagcaaccttccttatctcttctgactagttttagtttgaagtctatttttttttcaggtacgagaatgaataactttggtcatccttttacaccaaggtgatgtttgttgttgatactgagggtttgtttgtttgtttgtttgtttgttttctcccacttcttttattctgtggttttgtttctgtttttgtttgagacagaaaaaaaaaagggttttgttttctaagcctgtaaactagccagtgtgtctttgttatagaatggaggatatggatattagaagtcattatcaaacagtatgtattaattcctgtcatactgttttgtggttacaaatttagacttcttctggatctttttatggattcccagttctaccttggatgtatttatttttcttttcagatccaagtgttgcttccagtatcttttgcagagccagattaatgataatacgttcttttaactgttatcatgaaacaattttatttttacttttacttttaatagataggtatgtgcactataactctggaatgacagttgtggtttttcagtactgagagtccattctctcacatccccctggcttttaattttactgtcaaataacaaggtattattcaaattaggctgcttttataagtgacttgagtgtagtggcttgtattacaaatgctaattatgttcccaaaaacctgtttgcataagagtgtctgcaagtagcttctgggaacctaacccccattggttctgattggtaaataaagatgccaatagctaatagttgggatgtacaggcagacacaggattttaggattcttgggttcaggagccagaacaggaagaaggagatccaccatgctgggagggtgtgaacctgaggagagatgccttgcccatagttcaggacagaagcatagcctccaagtgagggagtcaggagagtgcagcccaactgagtcaagggcagccaagatagaacagaagtagtagataataactcaggattaaccatatgtaggttaggcagtggcccagctattgtgctgtttaaagtatattaaaatataaagtgtgtgtgtgtgtgtgtgtgtgtgtgtgtgtgtgtgtgtgtgtgtgtgtgtgtgtctttccttaggtaacataaaccattgaggttggtagcgaacctgccacaattattaataaagtaatttattcaacatttaagttttctctcttacagttttcattactttttctttattcttctttaatgttttaagtctaacacataatggatatgttttgtttttttcttttctcttttttccctcttctctttagtttcttgtcaacctcttgtacatgggtggccaactctttcttctaggtttgttttgttctatgtttttactgaaagtggtcttcatgacttctctatgatattctccttctgtgttcatattccaatggttatatttctctgagatctctcccacactctgttcatgtattttaaaaaaaacttattactgactgtcactgagtgatatgatttccttgccttgtctttcattcttgatactctattgtctttcattcttcatactctatgatgcattccttcgagttttgtgtttagtttaagggtgtcatttccaatatccttttgaattggcttttcctcagcaattttatctcttagttgcattcgattataatattatcttctttcatttttccctttgagtttgttttcctggagtatactcagctgttctctgagtgctttgaacatacttaaataattattttgaacatttttatctggactctcttccagatcatttgtattaaatgtcactattatgggattagtcatttgtgtaggaaacatcttatcttggttgttttatggttttgcttgtttctggtttctttcttgttttatgggttgcttgaacatnnnnnnnnnnnnnnnnnnnnnnnnnnnnnnnnnnnnnnnnnnnnnnnnnnnnnnnnnnnnnnnnnnnnnnnnnnnnnnnnnnnnnnnnnnnnnnnnnnnnnnnnnnnnnntccctccctccctcccttcctttcttccttccttccctgacccagcctgctcagtcagtcaacaggttctccagcacaggagtgaggattaaaaagaaaaaagacagacaacattgtagcgcgaccccagtcaattctgagactgaaggcaaatttttattttccaacccactttttataccattttaattacatgcaagtattttgggcaagcagtacaataagaactactaacaaagcagttgttaaaaagggcttgtcattatgaccgaaatactggagcccacttcctcatccaagcccaaaaatcttgactaagtcctagttccaccctaagaataaaattcctgccttaccctacttccctattacagcgtaaagttagattctcgcccttatcttgctctaatgtcagattcctgcctgagcttacttccttgtccttggccaatgtcagactcctgccaagcagtaccccaaaaggctttccacacttccttctttcttttcttttctttctttctttctttctttctttctttctttctttctttctttctttctttctttctcttgttttgttcctagttgctttccttctttcggtggagatgtttacaatgttcagaagaggaatgaatcttagtaaggttgaggcatttgttttctctaagtgctggtagaggacattcagaggttagcctaagcaagacagacagagggcttctacttgcttcagaagggcttgtggaacagattgctagagcagcattcctgggggtaggctagactggtgtagaggattgttctcagtttctggagtgtaatccctgtgcattataggtgggcttaagcaagagaagtagggtggaggaggtcttgttgtttggactactggaacaagaactctatgggcaacataggcaatcctaagccagggaaaccagggtctgctacttgttgcagaaggttacgtgtgctggaatccaggagaagaaagcccctgatctgtatatattcctggtggaggaggccatagacagtacctgcagcatttgttccttggtaatataggttaacctaggcattaaaactcatgtttccacacatgatatggaaaatgtctctgctgtttaattctctaggttaagtttctaaaaattttgtgatttattttatgctaaaatcttagtagaataaattatatatattataaattacatataaaattatatgtgtgtgtgtgtgtgtattcagtttacttttaaccattagtctatggataagactaagctttaataaattataataatgataaaaatggctcatttctattatgaaaaatattgaaactaatcttcaaatttagcataataaaaacccagagtgtaatctaattctgagaatgaatcattaagtaatattgaataagtcaggataactcactttgatcaaacatctaagcaatctatcatatgtaatatctccacatatattctattaatgatttgaatgctaaaattattctatgtagagctctttataatatctgacacttctttttacttgactgtcattcctcatttctgtttcctgttttaggcatatatagcaaatattatagcttacttgttacaaaatttgtagagtgtatggaaagagtatttgtgtttattgctgtatcttagtactgacagacattagtgcctgacaaaatcatttagtagtgatgtctcaattaataaacaatgatgtgtagtgataatatcatcctcttcatctgagcaacaacatgcaagttaaaaaaggagactttcccagcttcatggcttcttagctgttcttttgcattcaatcaaaggctttggcttaggtagaagtgaaaatcaaggcttcacagccttaaattggataaaaaccacatacactagcccaaggaggttaaaaaaaacccaaacaaacaaaaagacagaaaaccaggctgttagttacaggtaagtgggaatacaggctctaagagcatcctgacccagatgttctttagccaccttggacattacctgaccttcctggatacagagatatttatgaataatggaatgaattgtgagagtactatttttattcttcttaatcagaaaccagtgaatttgtgtaaggtgaagtgaaagcctctcttgactctgaattctgtgatcactttgcatgcaaatgaataactctctgtctcctttctttgaatatataacaatcccactccaaacattcttgattttttaattgaaaaaaagtcacatagcatattttgatcacacctgaacttctcctagatcctccccacctcctgacccacacaactgtatgtctttcttttttttttcttttctctcctttaatttctctctttcattcaaaaacaaacaacaaaaccaggaaacacaaaacacccataacatcacaaaaatgaaaaccaaaacaagcaagcaaacgtccaataggacaaagcattctgtaggctgccaatttgccagaattatgtaattccctgtcctacagaagtgtccaagcctcctgaggtcccatttactaattactggtctgtgcttgtgctattggtatcctgttcagaaaggctttctgtgccagagtttaagcttattctgtactttctcttctatcagattcatggtgtcaatttttatgttggagttgtgttttatgacaaattacagatgtggatatattttcattaaattatgtgtagtcgtccagtttactgttcactaacaccaaccaattttgaagttgctgaattccctccagtgatttttacttctttgtcaaaatcagattcttgcatggacttttgtctgggttttcagtttgatccaatgtttatgaacactgtttctgtttcatgcaaatatcatattatttttataatatataataatactgcaaaaaaatttaagtcttgtatggtgatacttccaggatttctttaacaattagtgactattttaggtactgtaggttttttgtgtgtttccagtgaagattgagttttcaatttctgtgaaaaattatgatgaaattttcataaatattgcactggtggaagtttcttttggtagggctattcctactgatccttgagcatgtgagacctttccatcttctggtgtctattttaatatttgtgtttagtgtcttaaggtttttctttaaaaactattttacttacttggttagtattttacatacttggttagagttgtccaaaactgcatttaggctattataaagagtgttgtttccctgatttctttcttattttgtttctcatatatttataggaggctatttatttttgagtgttatttttttatcctgctatttgctgaaagtgtttattaaatgtttaagtttcctggtgggggttttaaggattattttcatacagattgtatcatctgaaaccaaatgacttgccttctttcttttctctttgtatctacttgatcttcttcagcaatatccttcttgctctaagacttcaagttccatatggaatatgtatggaaaagtcctcttgtcatgttctaaatgttaattgacatgcttaaatctctttgttagtttgatgtttgttatgaattccattattatgtagaggtatttccctggtacctctattcgcttcagaagttttgaacataaagaaatgttgagtttaagatttgggggtttttgttctttgcttgcttgcttgtttttatttgtgtgtgtgtgtgtgtatgtgtgtgtgtgtgtgtgtgcgtgtgtgtgtgtgtgtgtgtgtgtgtgtgagagagagagagagagagagagagagagagagagagagagagagagagagagagcgagctttgtctgaattgtgtttgtatttgagtttgtttctgtggtggactgtgtttattagttttcatgtattgaaactttcctcctctaggatgaaggcaactcagtaatgagcaataaatttttgttattgttcttaaccttgagtttggtttgcatgtactttttgagaattatttcatcgacattgataggagaaattgatctatatattttgtttttggtctgtttttatgggttcagttatcagagtacttgtggtctcataacaataggcaacgtaccttgtgtctctgtttcacagaatagtttagagaatattggcaggaattattttttgaaattgtggtaaaattcaacattgattttatttggtcctctgtgttttgtgatgcagagggtgattttaattatttttaaatttatttttaggcttttaattgccacttctatttcaacaggacttgaagttttctttaaattgcttatctgattttgactttactatattagaagatagttatcaagatacgtgcgtgcacacacacacatacacatgcacatgnnnnnnnnnnnnnnnnnnnngagttggtgtgggtggtgtgcatcatataataccaatatatggtagagtggctataggatgcatttgagaatgagggaatatatacacatatatatatgtggaaaacatgtttttaacatttgcatctgtcaatgactaaccatcctattctcatattctcttagaatttgatttagtcattctatttagcctcagcaatattgcagtagtttgagtaaattttttattttcttttccttttgtgtgtactcaggactacagatagaattctgacttctctagaacaagtcagaaaaacttgaagaagaaacttctttatttcttctagatattcttttcgtaaatagaagttagagaatccaaacaaaatgttcttaatcatataaacattctcacacacagtgaaacatacagacactgacaaacacccattagggtagaaaactaaatttacctagtcatcatagttttcttccctattgtgtctgagagcaacatgcattaaataaagaatacaacagggatttaattataaattgaaatgagtgctatgaaggcgaagatcagatagctctgcaaaccagactagtttgttaagtctcagaaaaaaacaaacaaacaaataaacaaacaaacaaacaaaaaaacctcattgaaacatggagatgtgcataggatttaatcattcaataaggaaagaatgctccttattggaacaggaagcaactccaatggagaatttgagacgttctttgaactttagttgtttccaaagacccaagtgattaggagcctgcaggaagaaaagagtgcactgaaatgacctttgacaaataggtgagtaaaccacattcctgtttttttgacaacatagcattttatgggttactcaaagcagaaatttgttccacatttctggaggttaaagatgaaattatgacattactaactgtgcttctgaaagacccacaatgtgagggctcccccacgttctgactcaggagaggtgacaccccaaaatcacccacaagaaacgggtcttgctgcaaattgcaagaggatttttattcaagagcgctctcgggcccatggtcatacaccacgccaggggtagaggaccatggcgccccgagtagctgggtaaggggggtatttaaaggaagaaactgaaactcaaggaagtggggaggggcgttgttggaagataccaaagataccagttaagagtcacaagggaagtnnnnnnnnnnnnnnnnnnnnnnnnnnnnnnnnnnnnnnnnnnnnnnnnnnnnnnnnnnnnnnnnnnnnnnnnnnnnnnnnnnnnnnnnnnnnnnnnnnnnnnnnnnnnnnnnnnnnnnnnnnnnnnnnnnnnnnnnnnnnnnnnnnnnnnnnnnnnnnnnnnnnnnnnnnnnnnnnnnnnnnnnnnnnnnnnnnnnnnnnnnnnnnnnnnnnnnnnnnnnnnnnnnnnnnnnnnnnnnnnnnnnnnnnnnnnnnnnnnnnnnnnnnnnnnnnnnnnnnnnnnnnnnnnnnnnnnnnnnnnnnnnnnnnnnnnnnnnnnnnnnnnnnnnnnnnnnnnnnnnnnnnnnnnnnnnnnnnnnnnnnnnnnnnnnnnnnnnnnnnnnnnnnnnnnnnnnnnnnnnnnnnnnnnnnnnnnnnnnnnnnnnnnnnnnnnnnnnnnnnnnnnnnnnnnnnnnnnnnnnnnnnnnnnnnnnnnnnnnnnnnnnnnnnnnnnnnnnnnnnnnnnnnnnnnnnnnnnnnnnnnnnnnnnnnnnnnnnnnnnnnnnnnnnnnnnnnnnnnnnnnnnnnnnnnnnnnnnnnnnnnnnnnnnnnnnnnnnnnnnnnnnnnnnnnnnnnnnnnnnnnnnnnnnnnnnnnnnnnnnnnnnnnnnnnnnnnnnnnnnnnnnnnnnnnnnnnnnnnnnnnnnnnnnnnnnnnnnnnnnnnnnnnnnnnnnnnnnnnnnnnnnnnnnnnnnnnnnnnnnnnnnnnnnnnnnnnnnnnnnnnnnnnnnnnnnnnnnnnnnnnnnnnnnnnnnnnnnnnnnnnnnnnnnnnnnnnnnnnnnnnnnnnnnnnnnnnnnnnnnnnnnnnnnnnnnnnnnnnnnnnnnnnnnnnnnnnnnnnnnnnnnnnnnnnnnnnnnnnnnnnnnnnnnnnnnnnnnnnnnnnnnnnnnnnnnnnnnnnnnnnnnnnnnnnnnnnnnnnnnnnnnnnnnnnnnnnnnnnnnnnnnnnnnnnnnnnnnnnnnnnnnnnnnnnnnnnnnnnnnnnnnnnnnnnnnnnnnnnnnnnnnnnnnnnnnnnnnnnnnnnnnnnnnnnnnnnnnnnnnnnnnnnnnnnnnnnnnnnnnnnnnnnnnnnnnnnnnnnnnnnnnnnnnnnnnnnnnnnnnnnnnnnnnnnnnnnnnnnnnnnnnnnnnnnnnnnnnnnnnnnnnnnnnnnnnnnnnnnnnnnnnnnnnnnnnnnnnnnnnnnnnnnnnnnnnnnnnnnnnnnnnnnnnnnnnnnnnnnnnnnnnnnnnnnnnnnnnnnnnnnnnnnnnnnnnnnnnnnnnnnnnnnnnnnnnnnnnnnnnnnnnnnnnnnnnnnnnnnnnnnnnnnnnnnnnnnnnnnnnnnnnnnnnnnnnnnnnnnnnnnnnnnnnnnnnnnnnnnnnnnnnnnnnnnnnnnnnnnnnnnnnnnnnnnnnnnnnnnnnnnnnnnnnnnnnnnnnnnnnnnnnnnnnnnnnnnnnnnnnnnnnnnnnnnnnnnnnnnnnnnnnnnnnnnnnnnnnnnnnnnnnnnnnnnnnnnnnnnnnnnnnnnnnnnnnnnnnnnnnnnnnnnnnnnnnnnnnnnnnnnnnnnnnnnnnnnnnnnnnnnnnnnnnnnnnnnnnnnnnnnnnnnnnnnnnnnnnnnnnnnnnnnnnnnnnnnnnnnnnnnnnnnnnnnnnnnnnnnnnnnnnnnnnnnnnnnnnnnnnnnnnnnnnnnnnnnnnnnnnnnnnnnnnnnnnnnnnnnnnnnnnnnnnnnnnnnnnnnnnnnnnnnnnnnnnnnnnnnnnnnnnnnnnnnnnnnnnnnnnnnnnnnnnnnnnnnnnnnnnnnnnnnnnnnnnnnnnnnnnnnnnnnnnnnnnnnnnnnnnnnnnnnnnnnnnnnnnnnnnnnnnnnnnnnnnnnnnnnnnnnnnnnnnnnnnnnnnnnnnnnnnnnnnnnnnnnnnnnnnnnnnnnnnnnnnnnnnnnnnnnnnnnnnnnnnnnnnnnnnnnnnnnnnnnnnnnnnnnnnnnnnnnnnnnnnnnnnnnnnnnnnnnnnnnnnnnnnnnnnnnnnnnnnnnnnnnnnnnnnnnnnnnnnnnnnnnnnnnnnnnnnnnnnnnnnnnnnnnnnnnnnnnnnnnnnnnnnnnnnnnnnnnnnnnnnnnnnnnnnnnnnnnnnnnnnnnnnnnnnnnnnnnnnnnnnnnnnnnnnnnnnnnnnnnnnnnnnnnnnnnnnnnnnnnnnnnnnnnnnnnnnnnnnnnnnnnnnnnnnnnnnnnnnnnnnnnnnnnnnnnnnnnnnnnnnnnnnnnnnnnnnnnnnnnnnnnnnnnnnnnnnnnnnnnnnnnnnnnnnnnnnnnnnnnnnnnnnnnnnnnnnnnnnnnnnnnnnnnnnnnnnnnnnnnnnnnnnnnnnnnnnnnnnnnnnnnnnnnnnnnnnnnnnnnnnnnnnnnnnnnnnnnnnnnnnnnnnnnnnnnnnnnnnnnnnnnnnnnnnnnnnnnnnnnnnnnnnnnnnnnnnnnnnnnnnnnnnnnnnnnnnnnnnnnnnnnnnnnnnnnnnnnnnnnnnnnnnnnnnnnnnnnnnnnnnnnnnnnnnnnnnnnnnnnnnnnnnnnnnnnnnnnnnnnnnnnnnnnnnnnnnnnnnnnnnnnnnnnnnnnnnnnnnnnnnnnnnnnnnnnnnnnnnnnnnnnnnnnnnnnnnnnnnnnnnnnnnnnnnnnnnnnnnnnnnnnnnnnnnnnnnnnnnnnnnnnnnnnnnnnnnnnnnnnnnnnnnnnnnnnnnnnnnnnnnnnnnnnnnnnnnnnnnnnnnnnnnnnnnnnnnnnnnnnnnnnnnnnnnnnnnnnnnnnnnnnnnnnnnnnnnnnnnnnnnnnnnnnnnnnnnnnnnnnnnnnnnnnnnnnnnnnnnnnnnnnnnnnnnnnnnnnnnnnnnnnnnnnnnnnnnnnnnnnnnnnnnnnnnnnnnnnnnnnnnnnnnnnnnnnnnnnnnnnnnnnnnnnnnnnnnnnnnnnnnnnnnnnnnnnnnnnnnnnnnnnnnnnnnnnnnnnnnnnnnnnnnnnnnnnnnnnnnnnnnnnnnnnnnnnnnnnnnnnnnnnnnnnnnnnnnnnnnnnnnnnnnnnnnnnnnnnnnnnnnnnnnnnnnnnnnnnnnnnnnnnnnnnnnnnnnnnnnnnnnnnnnnnnnnnnnnnnnnnnnnnnnnnnnnnnnnnnnnnnnnnnnnnnnnnnnnnnnnnnnnnnnnnnnnnnnnnnnnnnnnnnnnnnnnnnnnnnnnnnnnnnnnnnnnnnnnnnnnnnnnnnnnnnnnnnnnnnnnnnnnnnnnnnnnnnnnnnnnnnnnnnnnnnnnnnnnnnnnnnnnnnnnnnnnnnnnnnnnnnnnnnnnnnnnnnnnnnnnnnnnnnnnnnnnnnnnnnnnnnnnnnnnnnnnnnnnnnnnnnnnnnnnnnnnnnnnnnnnnnnnnnnnnnnnnnnnnnnnnnnnnnnnnnnnnnnnnnnnnnnnnnnnnnnnnnnnnnnnnnnnnnnnnnnnnnnnnnnnnnnnnnnnnnnnnnnnnnnnnnnnnnnnnnnnnnnnnnnnnnnnnnnnnnnnnnnnnnnnnnnnnnnnnnnnnnnnnnnnnnnnnnnnnnnnnnnnnnnnnnnnnnnnnnnnnnnnnnnnnnnnnnnnnnnnnnnnnnnnnnnnnnnnnnnnnnnnnnnnnnnnnnnnnnnnnnnnnnnnnnnnnnnnnnnnnnnnnnnnnnnnnnnnnnnnnnnnnnnnnnnnnnnnnnnnnnnnnnnnnnnnnnnnnnnnnnnnnnnnnnnnnnnnnnnnnnnnnnnnnnnnnnnnnnnnnnnnnnnnnnnnnnnnnnnnnnnnnnnnnnnnnnnnnnnnnnnnnnnnnnnnnnnnnnnnnnnnnnnnnnnnnnnnnnnnnnnnnnnnnnnnnnnnnnnnnnnnnnnnnnnnnnnnnnnnnnnnnnnnnnnnnnnnnnnnnnnnnnnnnnnnnnnnnnnnnnnnnnnnnnnnnnnnnnnnnnnnnnnnnnnnnnnnnnnnnnnnnnnnnnnnnnnnnnnnnnnnnnnnnnnnnnnnnnnnnnnnnnnnnnnnnnnnnnnnnnnnnnnnnnnnnnnnnnnnnnnnnnnnnnnnnnnnnnnnnnnnnnnnnnnnnnnnnnnnnnnnnnnnnnnnnnnnnnnnnnnnnnnnnnnnnnnnnnnnnnnnnnnnnnnnnnnnnnnnnnnnnnnnnnnnnnnnnnnnnnnnnnnnnnnnnnnnnnnnnnnnnnnnnnnnnnnnnnnnnnnnnnnnnnnnnnnnnnnnnnnnnnnnnnnnnnnnnnnnnnnnnnnnnnnnnnnnnnnnnnnnnnnnnnnnnnnnnnnnnnnnnnnnnnnnnnnnnnnnnnnnnnnnnnnnnnnnnnnnnnnnnnnnnnnnnnnnnnnnnnnnnnnnnnnnnnnnnnnnnnnnnnnnnnnnnnnnnnnnnnnnnnnnnnnnnnnnnnnnnnnnnnnnnnnnnnnnnnnnnnnnnnnnnnnnnnnnnnnnnnnnnnnnnnnnnnnnnnnnnnnnnnnnnnnnnnnnnnnnnnnnnnnnnnnnnnnnnnnnnnnnnnnnnnnnnnnnnnnnnnnnnnnnnnnnnnnnnnnnnnnnnnnnnnnnnnnnnnnnnnnnnnnnnnnnnnnnnnnnnnnnnnnnnnnnnnnnnnnnnnnnnnnnnnnnnnnnnnnnnnnnnnnnnnnnnnnnnnnnnnnnnnnnnnnnnnnnnnnnnnnnnnnnnnnnnnnnnnnnnnnnnnnnnnnnnnnnnnnnnnnnnnnnnnnnnnnnnnnnnnnnnnnnnnnnnnnnnnnnnnnnnnnnnnnnnnnnnnnnnnnnnnnnnnnnnnnnnnnnnnnnnnnnnnnnnnnnnnnnnnnnnnnnnnnnnnnnnnnnnnnnnnnnnnnnnnnnnnnnnnnnnnnnnnnnnnnnnnnnnnnnnnnnnnnnnnnnnnnnnnnnnnnnnnnnnnnnnnnnnnnnnnnnnnnnnnnnnnnnnnnnnnnnnnnnnnnnnnnnnnnnnnnnnnnnnnnnnnnnnnnnnnnnnnnnnnnnnnnnnnnnnnnnnnnnnnnnnnnnnnnnnnnnnnnnnnnnnnnnnnnnnnnnnnnnnnnnnnnnnnnnnnnnnnnnnnnnnnnnnnnnnnnnnnnnnnnnnnnnnnnnnnnnnnnnnnnnnnnnnnnnnnnnnnnnnnnnnnnnnnnnnnnnnnnnnnnnnnnnnnnnnnnnnnnnnnnnnnnnnnnnnnnnnnnnnnnnnnnnnnnnnnnnnnnnnnnnnnnnnnnnnnnnnnnnnnnnnnnnnnnnnnnnnnnnnnnnnnnnnnnnnnnnnnnnnnnnnnnnnnnnnnnnnnnnnnnnnnnnnnnnnnnnnnnnnnnnnnnnnnnnnnnnnnnnnnnnnnnnnnnnnnnnnnnnnnnnnnnnnnnnnnnnnnnnnnnnnnnnnnnnnnnnnnnnnnnnnnnnnnnnnnnnnnnnnnnnnnnnnnnnnnnnnnnnnnnnnnnnnnnnnnnnnnnnnnnnnnnnnnnnnnnnnnnnnnnnnnnnnnnnnnnnnnnnnnnnnnnnnnnnnnnnnnnnnnnnnnnnnnnnnnnnnnnnnnnnnnnnnnnnnnnnnnnnnnnnnnnnnnnnnnnnnnnnnnnnnnnnnnnnnnnnnnnnnnnnnnnnnnnnnnnnnnnnnnnnnnnnnnnnnnnnnnnnnnnnnnnnnnnnnnnnnnnnnnnnnnnnnnnnnnnnnnnnnnnnnnnnnnnnnnnnnnnnnnnnnnnnnnnnnnnnnnnnnnnnnnnnnnnnnnnnnnnnnnnnnnnnnnnnnnnnnnnnnnnnnnnnnnnnnnnnnnnnnnnnnnnnnnnnnnnnnnnnnnnnnnnnnnnnnnnnnnnnnnnnnnnnnnnnnnnnnnnnnnnnnnnnnnnnnnnnnnnnnnnnnnnnnnnnnnnnnnnnnnnnnnnnnnnnnnnnnnnnnnnnnnnnnnnnnnnnnnnnnnnnnnnnnnnnnnnnnnnnnnnnnnnnnnnnnnnnnnnnnnnnnnnnnnnnnnnnnnnnnnnnnnnnnnnnnnnnnnnnnnnnnnnnnnnnnnnnnnnnnnnnnnnnnnnnnnnnnnnnnnnnnnnnnnnnnnnnnnnnnnnnnnnnnnnnnnnnnnnnnnnnnnnnnnnnnnnnnnnnnnnnnnnnnnnnnnnnnnnnnnnnnnnnnnnnnnnnnnnnnnnnnnnnnnnnnnnnnnnnnnnnnnnnnnnnnnnnnnnnnnnnnnnnnnnnnnnnnnnnnnnnnnnnnnnnnnnnnnnnnnnnnnnnnnnnnnnnnnnnnnnnnnnnnnnnnnnnnnnnnnnnnnnnnnnnnnnnnnnnnnnnnnnnnnnnnnnnnnnnnnnnnnnnnnnnnnnnnnnnnnnnnnnnnnnnnnnnnnnnnnnnnnnnnnnnnnnnnnnnnnnnnnnnnnnnnnnnnnnnnnnnnnnnnnnnnnnnnnnnnnnnnnnnnnnnnnnnnnnnnnnnnnnnnnnnnnnnnnnnnnnnnnnnnnnnnnnnnnnnnnnnnnnnnnnnnnnnnnnnnnnnnnnnnnnnnnnnnnnnnnnnnnnnnnnnnnnnnnnnnnnnnnnnnnnnnnnnnnnnnnnnnnnnnnnnnnnnnnnnnnnnnnnnnnnnnnnnnnnnnnnnnnnnnnnnnnnnnnnnnnnnnnnnnnnnnnnnnnnnnnnnnnnnnnnnnnnnnnnnnnnnnnnnnnnnnnnnnnnnnnnnnnnnnnnnnnnnnnnnnnnnnnnnnnnnnnnnnnnnnnnnnnnnnnnnnnnnnnnnnnnnnnnnnnnnnnnnnnnnnnnnnnnnnnnnnnnnnnnnnnnnnnnnnnnnnnnnnnnnnnnnnnnnnnnnnnnnnnnnnnnnnnnnnnnnnnnnnnnnnnnnnnnnnnnnnnnnnnnnnnnnnnnnnnnnnnnnnnnnnnnnnnnnnnnnnnnnnnnnnnnnnnnnnnnnnnnnnnnnnnnnnnnnnnnnnnnnnnnnnnnnnnnnnnnnnnnnnnnnnnnnnnnnnnnnnnnnnnnnnnnnnnnnnnnnnnnnnnnnnnnnnnnnnnnnnnnnnnnnnnnnnnnnnnnnnnnnnnnnnnnnnnnnnnnnnnnnnnnnnnnnnnnnnnnnnnnnnnnnnnnnnnnnnnnnnnnnnnnnnnnnnnnnnnnnnnnnnnnnnnnnnnnnnnnnnnnnnnnnnnnnnnnnnnnnnnnnnnnnnnnnnnnnnnnnnnnnnnnnnnnnnnnnnnnnnnnnnnnnnnnnnnnnnnnnnnnnnnnnnnnnnnnnnnnnnnnnnnnnnnnnnnnnnnnnnnnnnnnnnnnnnnnnnnnnnnnnnnnnnnnnnnnnnnnnnnnnnnnnnnnnnnnnnnnnnnnnnnnnnnnnnnnnnnnnnnnnnnnnnnnnnnnnnnnnnnnnnnnnnnnnnnnnnnnnnnnnnnnnnnnnnnnnnnnnnnnnnnnnnnnnnnnnnnnnnnnnnnnnnnnnnnnnnnnnnnnnnnnnnnnnnnnnnnnnnnnnnnnnnnnnnnnnnnnnnnnnnnnnnnnnnnnnnnnnnnnnnnnnnnnnnnnnnnnnnnnnnnnnnnnnnnnnnnnnnnnnnnnnnnnnnnnnnnnnnnnnnnnnnnnnnnnnnnnnnnnnnnnnnnnnnnnnnnnnnnnnnnnnnnnnnnnnnnnnnnnnnnnnnnnnnnnnnnnnnnnnnnnnnnnnnnnnnnnnnnnnnnnnnnnnnnnnnnnnnnnnnnnnnnnnnnnnnnnnnnnnnnnnnnnnnnnnnnnnnnnnnnnnnnnnnnnnnnnnnnnnnnnnnnnnnnnnnnnnnnnnnnnnnnnnnnnnnnnnnnnnnnnnnnnnnnnnnnnnnnnnnnnnnnnnnnnnnnnnnnnnnnnnnnnnnnnnnnnnnnnnnnnnnnnnnnnnnnnnnnnnnnnnnnnnnnnnnnnnnnnnnnnnnnnnnnnnnnnnnnnnnnnnnnnnnnnnnnnnnnnnnnnnnnnnnnnnnnnnnnnnnnnnnnnnnnnnnnnnnnnnnnnnnnnnnnnnnnnnnnnnnnnnnnnnnnnnnnnnnnnnnnnnnnnnnnnnnnnnnnnnnnnnnnnnnnnnnnnnnnnnnnnnnnnnnnnnnnnnnnnnnnnnnnnnnnnnnnnnnnnnnnnnnnnnnnnnnnnnnnnnnnnnnnnnnnnnnnnnnnnnnnnnnnnnnnnnnnnnnnnnnnnnnnnnnnnnnnnnnnnnnnnnnnnnnnnnnnnnnnnnnnnnnnnnnnnnnnnnnnnnnnnnnnnnnnnnnnnnnnnnnnnnnnnnnnnnnnnnnnnnnnnnnnnnnnnnnnnnnnnnnnnnnnnnnnnnnnnnnnnnnnnnnnnnnnnnnnnnnnnnnnnnnnnnnnnnnnnnnnnnnnnnnnnnnnnnnnnnnnnnnnnnnnnnnnnnnnnnnnnnnnnnnnnnnnnnnnnnnnnnnnnnnnnnnnnnnnnnnnnnnnnnnnnnnnnnnnnnnnnnnnnnnnnnnnnnnnnnnnnnnnnnnnnnnnnnnnnnnnnnnnnnnnnnnnnnnnnnnnnnnnnnnnnnnnnnnnnnnnnnnnnnnnnnnnnnnnnnnnnnnnnnnnnnnnnnnnnnnnnnnnnnnnnnnnnnnnnnnnnnnnnnnnnnnnnnnnnnnnnnnnnnnnnnnnnnnnnnnnnnnnnnnnnnnnnnnnnnnnnnnnnnnnnnnnnnnnnnnnnnnnnnnnnnnnnnnnnnnnnnnnnnnnnnnnnnnnnnnnnnnnnnnnnnnnnnnnnnnnnnnnnnnnnnnnnnnnnnnnnnnnnnnnnnnnnnnnnnnnnnnnnnnnnnnnnnnnnnnnnnnnnnnnnnnnnnnnnnnnnnnnnnnnnnnnnnnnnnnnnnnnnnnnnnnnnnnnnnnnnnnnnnnnnnnnnnnnnnnnnnnnnnnnnnnnnnnnnnnnnnnnnnnnnnnnnnnnnnnnnnnnnnnnnnnnnnnnnnnnnnnnnnnnnnnnnnnnnnnnnnnnnnnnnnnnnnnnnnnnnnnnnnnnnnnnnnnnnnnnnnnnnnnnnnnnnnnnnnnnnnnnnnnnnnnnnnnnnnnnnnnnnnnnnnnnnnnnnnnnnnnnnnnnnnnnnnnnnnnnnnnnnnnnnnnnnnnnnnnnnnnnnnnnnnnnnnnnnnnnnnnnnnnnnnnnnnnnnnnnnnnnnnnnnnnnnnnnnnnnnnnnnnnnnnnnnnnnnnnnnnnnnnnnnnnnnnnnnnnnnnnnnnnnnnnnnnnnnnnnnnnnnnnnnnnnnnnnnnnnnnnnnnnnnnnnnnnnnnnnnnnnnnnnnnnnnnnnnnnnnnnnnnnnnnnnnnnnnnnnnnnnnnnnnnnnnnnnnnnnnnnnnnnnnnnnnnnnnnnnnnnnnnnnnnnnnnnnnnnnnnnnnnnnnnnnnnnnnnnnnnnnnnnnnnnnnnnnnnnnnnnnnnnnnnnnnnnnnnnnnnnnnnnnnnnnnnnnnnnnnnnnnnnnnnnnnnnnnnnnnnnnnnnnnnnnnnnnnnnnnnnnnnnnnnnnnnnnnnnnnnnnnnnnnnnnnnnnnnnnnnnnnnnnnnnnnnnnnnnnnnnnnnnnnnnnnnnnnnnnnnnnnnnnnnnnnnnnnnnnnnnnnnnnnnnnnnnnnnnnnnnnnnnnnnnnnnnnnnnnnnnnnnnnnnnnnnnnnnnnnnnnnnnnnnnnnnnnnnnnnnnnnnnnnnnnnnnnnnnnnnnnnnnnnnnnnnnnnnnnnnnnnnnnnnnnnnnnnnnnnnnnnnnnnnnnnnnnnnnnnnnnnnnnnnnnnnnnnnnnnnnnnnnnnnnnnnnnnnnnnnnnnnnnnnnnnnnnnnnnnnnnnnnnnnnnnnnnnnnnnnnnnnnnnnnnnnnnnnnnnnnnnnnnnnnnnnnnnnnnnnnnnnnnnnnnnnnnnnnnnnnnnnnnnnnnnnnnnnnnnnnnnnnnnnnnnnnnnnnnnnnnnnnnnnnnnnnnnnnnnnnnnnnnnnnnnnnnnnnnnnnnnnnnnnnnnnnnnnnnnnnnnnnnnnnnnnnnnnnnnnnnnnnnnnnnnnnnnnnnnnnnnnnnnnnnnnnnnnnnnnnnnnnnnnnnnnnnnnnnnnnnnnnnnnnnnnnnnnnnnnnnnnnnnnnnnnnnnnnnnnnnnnnnnnnnnnnnnnnnnnnnnnnnnnnnnnnnnnnnnnnnnnnnnnnnnnnnnnnnnnnnnnnnnnnnnnnnnnnnnnnnnnnnnnnnnnnnnnnnnnnnnnnnnnnnnnnnnnnnnnnnnnnnnnnnnnnnnnnnnnnnnnnnnnnnnnnnnnnnnnnnnnnnnnnnnnnnnnnnnnnnnnnnnnnnnnnnnnnnnnnnnnnnnnnnnnnnnnnnnnnnnnnnnnnnnnnnnnnnnnnnnnnnnnnnnnnnnnnnnnnnnnnnnnnnnnnnnnnnnnnnnnnnnnnnnnnnnnnnnnnnnnnnnnnnnnnnnnnnnnnnnnnnnnnnnnnnnnnnnnnnnnnnnnnnnnnnnnnnnnnnnnnnnnnnnnnnnnnnnnnnnnnnnnnnnnnnnnnnnnnnnnnnnnnnnnnnnnnnnnnnnnnnnnnnnnnnnnnnnnnnnnnnnnnnnnnnnnnnnnnnnnnnnnnnnnnnnnnnnnnnnnnnnnnnnnnnnnnnnnnnnnnnnnnnnnnnnnnnnnnnnnnnnnnnnnnnnnnnnnnnnnnnnnnnnnnnnnnnnnnnnnnnnnnnnnnnnnnnnnnnnnnnnnnnnnnnnnnnnnnnnnnnnnnnnnnnnnnnnnnnnnnnnnnnnnnnnnnnnnnnnnnnnnnnnnnnnnnnnnnctcccctctcccctctcccctctccctctccctctccttctccctctctctctccctctccctctctttagtttgcattctcttaagtgagttgaggtcattaatattgagaattataaatgtttgctgtttattgattcctgttcttcttttattatgtatggttttcttccttcactgattcatattctagtttcatttgtttcttctgccattttgagtgtagttaaacttttcagcctggagtgtttttatttagtaccttctagagggtaaaattgggaaatagaaatttctgaaggtttcttttattctgggatacttttctttatagattacgattgatatttttcttggtaacttcgtctgagctaacatattttctttcccatggtttgggaaagaaaggcccttttgggtttcagagtttcgaatcctaagtcaggtgttaccctaatggacttcctttgacctcctttgatactattttgtcttttacccttgcaactttgttgttgttgatgttttgttttgtttgtttgtttgtttgtttgagacaggatttctctgtatagccctggctgtcctggaactcactttgtagaccaggctgtagactcagatatggacctgtctctgcctcccaagtgctgggattaaaggtgtgcgccaccatcgcctggcttacacttgcaacttgaaatataatttttttcttctgtacctttaacattttgattatgtactgggagggatttttttctagcccttctatttggtgctctgtaacagctagaaagtagagattgtgtagaagaaaatgtttcttattctatgataatcaccaccttctttggcttaaataaattttcttctttgatgctattaaaaaatattctctgtgctttgacctggatttttcctctattcctcttacttgccttattttttcatattgttccagatttctaggatattttcaatgaattaatcaattaattaattaatatttaaatttattttatgtatgtgaatacactgtagctttcttaagacataccagacaagggtatcatatcccattacagtcagttgtgagccactgtgtggttgctgggattgaactcaggacctctggaagagcagtcacttttgagtgcttagttatctctccagcctgatttactgagtctcttatgactggctacatttctatttaacattttctttgactgagttatacatttttcctaaattttctttaatactctccaattctctattccatgacttgtagtttattggtgaggcttacatctgaggtttttgctagatcttctaagtttctcctttcctgttttatatcagttttttttccctttagctattcagtttctactttcatgtcctgaaatattttcattattttatccaaacatgtgtttatgttatcctggtcttcattacatttatttataacttctttcagttccatgaacacattcatactctctgtttaaaatccttatcttgggcttcagctaaactgtacttcgcagggactattgcaattgggttacatggaaggaagcatggtatcaaggatttcatgtttgtgcttttgtgcttgtatttagaaatctgaagtcatgatgtttgaggtgtatttggtttacatatttgatcttgtttttcttcttggtctgtgttctgtactgtgtttgcaggaagtttatatttttggaaagtgtgatggctgtagaaagcctggtacagaatgcttctgtaggttttttggtagcacaatggtatagagatgggtaagtacaaaaggctgactggaggacaggaaagaactagggaggcagggattgcacccaccaaagggcagggttccaggaagtggagatggggtacaagagggactccttcaagctagttgttacaggactaaaagtaattcttgagaggtataatggaggacaggatatatagataaaatcacctacccgtgtcccagacaaatatggccacatgtggactcaggtatctgactcaaaggaatggatatggactagaaaggaaggctgaaaaagtcatcacataagaactaaggggacctggtgaatcgaattcacatatcaagaggtgaattccctaggaatggaggtagagtgacaggataagatcccacatgcaagctaccagaggaagaagagtatggctaatgaaacaggaatgaaagtctataggtttattagaaaaaaaatctccattttgattgttcaaatgtcaagattgtttctggtgactgaataccatccatttttctgaagtcttttcttctcatctgacatctgagtacgtggattccacattttattactataactatgtactagttaatgtaagggaacttatgcctctttaagtcaattatttcattttcgcttgatatagaatgaggaaaactgaagaaagggtattataatttagtaaaataagtattaataagtgcaggggaatcagatctagtgaatagtatgatgaaaaatatgatataggcacttaaaatgtattaagagatcatgtttttaaatctgcttataccatccctattctacacacacacacacaaacacacagagaagcatagtatggccccatgactacattaatttgactatagggataatctctcaatgcatgtgtcaatggagctgtcatattatataacacaaatatgcaaatgttttctttgtcattggaaattttaaaatgtatatgcaattttaatgaaaatttatgcagttctattagaatcagtcactcataagccatgttgtttttcctctttatccctttaccctttagtagtatttagcatattcttagttgattatttatatggccagttcttgaattgtacttacttgtactctcagagttactttttaaaacatatatctgcatcttcttactggaagatgcataggaacccatatactatataaacatatcctttagtgacagttatggttataacatcacttttattgacaatgaataaaatttcttaatacttaatcttttaattttcaattttaagaaatatatttacttttattttgtgtgtagggatgtttttcctacatgtgtatcagagtaccatatgaatgctatgcctggggaagtcagaagaaggagtcaaatcctctggaactaggagttacagatcattaagagtcatcatgcaggtgctgagagtgaggtgggcctgcagtgctctaaactgctttccagccctcgttttacagtttagtagtaaagaaaatttactattttaagttccgagagaaataccaaacttaaatatttcttccatgtaagttatcattctaatggagaaattcaacttagaacacatttatctctggcttgttgttttggctttaaaagctagattacttttactgtctattggcttaaattacattatcagttaactcaaattcttgataatttcacaatttattgaaattgtttaataggacaattcagtctcagtctttgtttctgtcacactttgctacttgactctgccctaattttttccatccatcacataggaattatcttgtctaatgctttttaggataatcaactcatccttatttcttccagaaatttttcttgttactagctgtaaaattcttataaataggactggctacctccacttacaaaactatgatggctgttcaacttattctgtgcattccattacaggaaagcatggttaaatatatgagtacatttttgcttagaacagtcgctgtatatagaaaaagttgaagataccttttgttttatacttttatgaactttgtggctccccaactttatcctctagcatgatcaaccttggtgcctatggcatcataaactgtaagtaaaaagttcagttgctatctgaacaaacataacagtttgccattgaaaaattaatcttatctatttcagcaatattacatatattacatatgttacatatatcctgaaagcactatctggtattttaggcagacagtctaccttgtagaagatgagatttttgtatctgatagaactaaattggaatgtctgaacttttatttctctgctgtacaacagaaattttattaacccttataaaccccattaactataggttttggcttgaatctttgttcacattccatatatcactagattgtgatatggaaatgtgattttacatggtggctagaacacactatggctagatgacacagagagctgttttgtgatgtctgccacattaacagagtgagaatgtgccaaggaaggatcaaatatacttgatgtcagacttctcagcttccaggaatggaatacatggttgtagtgttagaactatcaacttgatgatattttactattgttgctactccagactaaattaagatagggtatttataaaattcatgattgcttttaaaacttttatactatgccaagtaggtatctaacaagtcctaatctcaaaagattagttttattaataatgtttacagtaataattgttactatttataccggagtaatatattgtgtgacattcaaagaatttaagcagtccaaattgcagtccccagaagtcaggtcacataactactaagattaatactgaaaataagtacacgttcaaaagcaagtagaaagtgacttgaaagtggacttcatacaatgtgtaactgcatgttaaaaatgagaccaggaattgagctgagttacacagctaagttgctagactctgaacagtttgtctactatctccattgaataccactgggcaatcttacaggagttttgactcccaaaggaactatatgaatctgcacttgcaaaatattttcacctgaattgagtatttgacctcaacacattcttgtaaattatgcaatactctcaagtgaaacatcaaactctcagagattaatgaccctccaaggtgatactctttgccagtggtagacctgatatggaaccctaggtactgtaacactgataatcacctcctaattgcttgtctctttgtattgagctcctcactgcacacttgttctttgatactgtagatataaccatactccatatggttcctatcattgcaagacaggttaagaacatgttcttaatacagcataatctatgtatttaactgctcattacagaacataaaaaaggaacaaaggaaagagaagtcacaaaaacaatttaatttaaatgactgaatgacaaaataagctatagaatagtaaaacattcatattaataggtgtctaaagttatggttaatattgctatgatgtaacaccatgactaaaagcaaattggaatggggttatttgccttacacatcttaaatcatacttctgagggaaaccaatgcaggaactcaccctgggcagggctttgaggcaatgaagtgctggatactggattgctattcatggcttgtttgcctgctttctaataaaaacctggaacagggtagtatgaaagttagggatatagctgttgttattcattctctgattcctccctctcagggtgttcagatgtctaggtgtgccaagctggaaggatgaagcagagtctggaagggatagggttctgtaggatccaggtcagtctgggagtgagttcctggtgtgtgcgggaggaagaggagataggagagaggccttcttccagtattttagtgttacagctcctttagattgagggattttattcagagtgttgggtgcatacacattatttgtaatgaacaaggagtatgtataaaccttggaaagtgggcaggaattttcagggtaaatgaaaatcattgaataaagttttaaagttctgtgaatacttaatttgcatggggaggcattctaggaatctcaggtacttcctggactatttcttaacaggtgtggggaggggagtggggtcagaggatgggcagtattggggcaagctgaacttgtaagtctcccaaagactattcaactgtttccagtagagtgtctggggtcaggatccccaggcaaggtgagagaaggagaagccctgctggaaagagagacttccatttggtcctgagctcagagaagatgtctagcaatacagtgtaagacttcgaccttaattagcagggtttccccacctgtgagtagtgatatatccctgcccacaaagtgttaagctttccccttaaatcactaaatgagacaattgcccataggcctgcttatggaggtattttctcaattgatattccttccttttagataacatttgcttgcatcaagatgacagtaaactacccagaacagctggtcattagaaaatctgtactttctacttaatcagttttttttttttccttagctgtctagaagaataaaatgcttaatttggaagcatctatccattagcattccagtgaataagcacattacacaataagaaatattgtagtagaacagcagcaataaccataatgacaagaattaggcaaactaataaaatatgcatacacaatgaaatctctctattttctacctttctgtatccatctttacaaatcagcttcaagtactccctctggttggagacctatgtaatacaaatctttgcatagcttaagtaggcaaaaatcagaagccctgacagatcaagtaatttattcaattcaggatcagctagagtttattcagacacaatgccctaaaccttttgtttcatgctatgtctatgaggataagacctgtttctcactttgatggttttcagccttgtgtataaagaagtgggaccatcttagacttgacagcctcaccattaatttccaagagtcaacctgatactgaatttaccattgattcactatctctctgcataaggttaggtagctgtcccaacctaagccatacactgacagcaataggaacaaaggacaaaggagtttattcttctagggaaagaataagtacttatgcatgcacctgacaaatacagaggtggatgctcacagccaactattggactgagcatggggtccccaatggaggagcaagagaaaggactgaaggagctgaaggggtttgcaaccccataggaagaacaacaataccaaccaaccagacccccaccccagagctcccagggactaaaccaccaaccaaagagtacacatggagggacccatggctccagccgcatatgtagcagagggtgtccttaactggcatcaatgagaggagaggcccttgattttgtgaaggcttgatgctccaaggtaggggaatttgaggtcaaggaggtgggagtgggtggatgggtaggggaacaccctcatagaagcagggggagggggaatgaatatggggtttgcaaggggggaaacctggaaagggaatagcatttggaatgtaaataaagaaaatatccgataaagaaagaataaaatactgggggatttcagaattaaaaagaagaagaagaaaaaaaaagaatacacacttaaggatcctgccacagcttctctgtcttctgatttctcctcaaaaaacacaacttcacatgtgtagatttcacaggtacaagaccaaaatggtaccttgcaagcgcaagagtcaggcctctgtgtggaacatcttgggcaaagcattgtgtgctaccaagttatccttctggtacaggcttcattgccaagccaacgccagctcctgctccagttgcacaaatgtattcagaggctgcccctttggaaaagcttctacttgagtatctagatgcctggtattttttattacttattttaaaatgctgttttaaaaatttcaaagtgatttttttctaacataaattccaggaaaaaaatatatattatgaaagcaaaacaaggccagacattttgtgtaatctaaaggtcaaagtatttaaaaggctgctggggctcacaaggcaacagcagtgcccaagcaaaacaaatcatgttaggggattgcatcagtctcccagtgttgccatagaagggcattaaacaggagaaggcttaaaatatgcaaatttgtcacaaaatgctggctagagtgtgggcaagtccagggtattttacacatattgagctaagttccttgtttgactattctaagatgtgtaagatgtgtctttatctatctatctatctatctatctatctatctatctatctatctatctatctatctatttatttattttacaaatttgatatcccttgactttattcatgtggctattttattttcacattgcctatctccgcttttctttcttttttttccattttttattaggtatttagctcatttacatttccaatnnnnnnnnnnnnnnnnnnnnccacccactcccccctttttggccctgtcattcccctgtactggggcatataaaatttgcgtgtccaatgggcctctctttccagtgatggccgactaggccatcttttgatacatatgcagctagagtcaagagctccggggtactggttagttcataatgttgttccacctatagggttgcagatccctttagctccttgggttctttctctagctcctccattgggagccctgtgatccatccattagctgactgtgagcatccacttctgtgtttgctaggccccagtatagtctcacaagagacagctacatctgggtcctttcgataaaatcttgctagtgtatgcaatggtgtcagcgtttggatgctgattatggggtggatccctggatatggcagtctctacatggtccatcctttcatctcagctccaaactttgtctctgtaactccttccatgggtgttttgttcccaattctaaggagggacatagtgtccacacttcagtcttcattcttcttgagtttcatgtgtttagcaaattgtatcttatatcttgggaatcctaggtttggggctaatatccacttatcagtgagtacatattgtgtgagttcctttgtgaatgtgttacctcactcaggatgatgccctccaggtccatccatttggctaggaatttcataaattcattcgttttaatagctgagtagtactccattgtgtagccagaagatgccccaactggtaagaaggacacatgctccactatcttcatagcagccttatttataatagccagaagctggaaagaacccagatgcccctcaacagaggaatggatacagaaaatgttcttttctttttttaaagttttgtctgagtaacctcttcagtttttgcatataccagtgtatatggatcagagccaatctgtatgaccttgcttttatttattttatttttttaaatcctgtatccaataaatagtggcatctgagatcctaggaatcaaaactcaaacacatcctttggaggaacataattcactcgatgtcagagatgaattaaaaggcaagtatcttctcagaaagggtgtcagccattcacctctggtctatgatactattcctaagccttaggctaggtttccaggttttggaaacccaaaggttttttttttttttttttatgtgaaaatgtatgtattcatttagatttatgaaagctaaactaagaataattgattccccacttgtgccatctgcacatgctcactttctcccatcttctacatctgcctgcctctaagatctaggacatcagtgtgtgttttgatttacctgtgggtgcagagctcctgattagtttttctaaggtggaactgctttagtatctttctttcagcattcacaaaccatgttatcctacttttttggaaaaaaaaaatctttccttagtttcctttattgttccacattttgagcagctagtattctagcaatacttttaaattgcacatggttttcaaatacactaagtgttttcatatggagtagaaacatatatgtgtatgatgactaaatagtatttgtctgtatcaaaggaaaatatttttgtatttctttttgtgtcagttttgcgtgtcatttctctgttatatgttcatgttacaaaacttaaaaattgtccttttaatttaaatttcctgtttaaaacataagataaaaaaaaactaccttgtgattcatattatatattatagtattattaatatccagaatgcattgaaattctcagaagatttggtaatgatgagggaagccataaaaaagtttatgactacctctagttataaacatacaacagtgagtgagttattttcattcacacacacacaaaagagatgatagtgaaagtatgtcttgcattttgtttttaagaaaataacctatttggaaagctttttaacctccttaaaaatctccattgggctcatttgtgtaatgtcataatgccttggtattgtatgttactgatgaatatctaattatctgcagtgatactgttgcacacttaagtatttacctgtaagggatattcctagaagtgagattcatgcatccaagaacgtgtacatttaaattggctgcatattgccaagtactctcaacaacaatatataaaaatgtctgtttcctcacagccttgccaatttttacagtctttggcaaacttgataggtttttaaaaaacagatgcattttctgttatttaatttgcattttacagaataattggggtgagcagctatccatatggttttaggatacatcaatcttcctcttttatttgtgaatcaaactgcttacttatcttcttcatgttttcccattgagcctctgttctttctgtagcaccccccctccctgtgttttagaaacaatagaaacactctcctcatttttaggtagtgttggtattttttttttttttttttttgtgcattgtgatttgggcaacaggattttctttaaaacaagattgttgttgttgttgttgttgtttttatcagaaattggtgacttccacatgcctagttgtatattaagcattgtcagcactggcagcgaaagcaccaatgcaggcagattgatggcccactcctcccatcgtgaggccaagctcctgaggaacacgggcaaagtgatcaaagcagatgcttcatttgccttctttcagaaagaaaatcacagtctccaccttaccttccagaatacatttatgacttaataaaatatctctttgaggttaaaaaatataaaagtatgaatgctaggtagagtcaacaaaaacacaaacttctataatatctttactgtatcattgattactaaggccttcttattttaatccttctatttacctccttctctaatgacccctgttttcatgttcctctttcttgtcctatgacatgtgacaatagcttttcttgacattgcttttatggagcacataccagtttgagtatgtatgaagtatcatacagaaaagacaagcttggtgaccacagaaatcctgacgttctacatggtcgtggtatttgtattcctttataaactcatccaatgaataagatagaactggagagtcacctctagatatttaaaggggggaaatattcacaatcccatgaagtaaatagattatgaattacaccatcccaacaccctggcatctaaaagacagtgcatgtccttttattaactggctttattgtaggcttcatgttgcattctcttgtgaaataaaacttaagccatttacttattttaagaaaatcaaacaactagaagaataggcatctttcatctgttgaaaaagtgagttcaaaattaggtttgtgggtgacagacgtattgacagccttgccatccatggaaatagacaaggaaaaggcagtgggttctgtggaagccttgaagtacttttgtggaacacattgattataccctttacctacatgatctttccttcacttttgagctaaatgaacagcatgactatcttgctagaacaacagaagaaacagagaagcagaaggaaggaagaaattaggaagagagaaaataggtagagaaactggtttatatcctaggctctatcctcaatggaccatggaacactaattatttctcctttacatcacactaggtgatggattttgtgtgctcatataaaactctaaatcaggcatcacgacatggaatagagaaatcaaaatagtttctaaaattcaatttggatggtatcttattgttcggtttattcctcaatactgaattaaagaaaaaatgataataaaaaagttttaccaaaataatattaagacatacaaatttttgtatcacattttttatattctaaacacattttttagcatccatgattttaaggattgcatgattaaatatctcatggcttgacaatgtaaataacttctggtatcaatcttcaaaatcatatattggagtcactgaatggatttggcaggaagtccatgaagtaataatatgaaattttatattatttcattaattcattcactcacttatttaccattttcaattaaactatggaagtcatgtgtgaaagaacagagtatggtttattccctaaaactgcaacctgcttacaaaacttgcatatacacacccacacccacacatatgtgcgtgcgtgcgtgcatgtatgtatatatattatatatgtatatattgtatgtatgcataatataatatatatgtgtatattatataaaatatatgtatatattatataaaatatatgtatatattatataaaatatatgctatagtatatgtaatatatatttatacagtgtataaaaatataatattatatattatgtatatgtattgtatatatatatatttagttggattttagctggtcattctacttggttggctattaaaaacatctgtattttaagctattttagaaaactattttgtttaatagaaatttctatcgtgttatattatttgtattgtgatgtgaatgaacagtagatagtggacatgctgacaaaatgatcatgtaatccttatctaacaaacaaacaaacaaacaacagtacaactcagtatggagatgcatgtctttagtcccaatacttcagaggcagagacagaggcaggcagaaaggcctttatgggttctatgccaagttgatccacataggaagccagtgagatctcattacacacaaaagtgatgatcactttcccatgttcagacatatgctggataggctgcatgaaagctggaagagcatagaaggtaatccagaagacactactatttcatttgtttgatgttggattttgtaccctcaaggctgagagtagatcttgagtatgttgaagaaaagtcattactaactttgaagttttcctgacctgtgtgtctatttgtccagtgtgtcactgcctacatatattgtcttctttttgtcctctttatagttggactatctcagacctgctagctatatacccaatgacacaggggtttattaatattttaaagctccggcctttcagctatgtaagtctcctagctactctcattgggctaatcctggcaatctgtcctgtcacattgccggctctacctttgctggttcatccattcaccaccaagtctgcaggctgaatttccgacctctgatttcttctcctagggtttctggaaactctatcccctgcttcctttccagatcttcatcatatccaattagataaaactagatctagactactttaggcaggtgaggaagaacaaatatttacaaacaagaaaactcagtaacggggcataggaatggcaatatccagaatcctgccagcatttagctctttgctggttcagaattaagaactgaatatacagacacatcttcacccaatgtagctcagcacctcctgactcatgacctcattaacacacttctctgtgtaaaatgctttataacactgtctgtccaattatctcttttccaattccttggagtagatgtttctcttggcaccttcaaattaggaaacatgcacgaagtacctcaataaaaagtgtctctgacaacaaggcagatctgcttggttgtcaggaataaggtacattttgattgtgaagggcactgtaaattttcacaattaataacattgcaaaggattccaagagccataccagacaccatcatggttctctgtagctcctttgcagctagtcaggaaccttaaagtgtatcaaaaaattcatggtttgtttagtctccctttttatgtgtttaatggagcatatcagaagcactggatggaacaagaacagaatgtatctttatctagctagtcctttcctctgtctgttgacgtaatctcaaatagatctcaaacaaccttcttgttgtcccaatgtttgattccacaaggtgtctctgtatgtagcattttcaaaagagaaagaacttgaatgacttttctttctctttatacaattattcttgtcagcatttagcctgctacttgaagtataactgtatgtcttacaaggttctcctgaattattttgccttcctccaatgacaattttgttttaatttttagctagatttatgtgttttcatcatattgtttctgctctgtacatctgaaacatcagtctttaaaatcactggagatactatgcagtaaaaactggagaccacctttttaaactgctagaacagtatttttatgtatttaagtaaattacccatctcaaaaactggatcattccattgacaaaataatcatcttttgtagaatgttttgttttaaatttgtcacttctcaatttttagtatcaaaatattatatctacaaacatttataataagtaaattattcaactccataaacataatgtaatatatcaaataatatttcaatgtacttttaaatgtattcttctgcataatttaaaagtaaaaatcattaaatgcatattgtttttgctttatgcatatctagattatttcttcatactattatgtacttagcaaaagcattgagaagattccttactcatgtgtaaaatagtaaatgtttatgagatttactttctgcataaataacaatgtcctcttatttatatcctaagatacaaagatacattattactccaaactactttgtcttcagtttgaataaaataaaattccatcacttgtaattctggccttcttttgctggtttacaatttttcttagtgtctactgtgtaatgaaaagctcttgagtaagttggccacagaaaagaggcatgaatctgggacacatgatgctgtctagtgacttaccagcctcacaggctcaggtttggaacctggcttcccttgagatttgttctaattttaatatatgctatttagcaaaggctgtgtgatccaacagcaagatagatgatacacaatctgagaataacacttcaggacatctttggcagccttctcttaaaacagagtccttgcactagcgaggtagcatgaccactcagtcatacctatgtgtttggcaaggcaacacttatgcccatgttcctcattgcaccatggaacactgcctatcatggcctttacttgaattgaaatttttattagataatattactggatttattcatcagtaatattaattcaaaaatacacactggaaaagtagcttgaagaaggattaaaatgaattccttttgtcctttgataaatttgtaatattacttgcaagcttcctcagtatggaaaaaagtccccaacataatgaatatagaagaaatccaatacacttgggtactttcctcattctccttcatgtaaacatatgcttaataaaacacattttacttgaggatcataaatatcgatagtctatttataaattcccaatgttcaaaagaatgtcagagcatcagaaatgagcagagtctatcgatcagcatgaagacgtgatgttgggaaaggtcagaaaaagattcagatagggccttgcctaatacatgttgacggcagaaaggagccaagctaagctatgctaagtcatcgcatcgataaaatattctggaaatctcatttcatttgattaatatcttgggtcaaataagggttgcattaaaattcagcagatatttgcattgtggcttcattttgtaattatgtagagtctttgtagcttgtcagacaaaacattagaccagatttaaggagagctaggaaggatgccctgcattgggtgattttaaatgcagtcctaggaggctccagagagtctgaaactgcatcatggctttctgttaaactcactgtcaccaacacagttatttgcacgtctaaatagtgtaagatgtttgtctaagcgaagggaataaaacaggagcaagacagtgcacagaaggggttttggcagcatttgagttgacatatggcaatgggctcccttctctcaggcaagaaatgacacatatgtctgaggactcgcttcactgaaatggagaagctcatattaggcagtggagactcctacgttttaaagccaacatagtcattcaattctaattaaaacatttaagacctgtatgacctcggttggcacctcagagtatcaattttagtcattgcaacttatctgttatttagttacagacatctcctcactggacaccttctttgtccccaacataattccaactgctataaattagtcaatacagatccctgcttctcactgagtttatcttttgacacttttagtgctattaagtaactataaaaatacaattaaagccccagcataacctttgtagtacatgctcagagaaatgtttcttctatttatttaaactctcacttgctttttgtttgttttccaaattcacacattatttcataaaggaactcagtgagtggttccggggcatatatttacttaacctttctctgtcatagatagcagttaaaaaatataagcaagatttacgcctgtcttcccaagccaaataacatctaattcttggttacaaagtcacatctacaccctgggtagccagggaggtaagaactgattcaagctgaagcaaaagcaagcaaaaaaggaacaaacaaaaccaagtggcaggtaagtgttttctaggccagagaatgcaagcaagagaggcctgtagccttttgtcacaaagttaaactgggtccagtattaccatatgccctacatgttccaaggaactagagagccaatttagccgattaagtattcacattgtgaagtaatggcaactaattattgaacaagcctaagtacacaattcacagcatgcacatgtgcacgctcatgcgtgcacacacacacacacatacagaaagagagagacagagggagagacatagtttgggagaggagaggagaagagaggagaggagaggaggggaggggaggggaggggtgtctgagtctctggctactgttannnnnnnnnnnnnnnnnnnntgttattctcagattgtgtatcatctatcttgctgttggatcacacagcctttgctaaatagcatatattataattagagcaaatctcaagggaagccaggttccaaacctgagcctgtgaggatggtaagtcactagacagcatcatgtgtcccagattcatgcctcttttctgtggccaacttactcgaaaggtaggggaggggaggggagaaagaggtagggagggaaacagagacagacagactgataaactgattttgtacataatcagtaaagcaagtctatggctaagtgataaattattcctttatatccctacaaaattgaagattgttgagattacatgaacatagcaggtgtcttctgagcttttcagtgagtttttatttctttgttttggtttgttttgtgatcaaatttgataatcttgccgtgaaactttttattttaaaataatatcaatgggtcctactccttactttctatttagaatcattagatatatatcaaaggatctatattcttaagtttatcttccaggaattgtgatgataatggaggcatgggaacagttggcccagaaagccagggattattgtacaggaagtacacaagattctttacagatttcattttttctggttttcaacctcacttctgtcaaagctaatggctgaactgtctggaagtttacacattgttaagcttcactctcatgtagaaagtcttctttgttggtctctgtcttttctcacaacttttatttatctctcaagtcgctgctccagaatcccccttctcagtgacttatgtgttaggctatgaaaacgcagtggatatgtggcttgtggtttggaaacacgttgacttccctgcattagagatacttgaaatgacatgttctctgtgtattataatatgttcttttgataaatctcatagcacatttcaagacaatgttggatgaaaaactgcaaaccctcatcctaatacagactaagaagttttgcaaatttggtatgttttgtactaagttcttatcctatcagcccttgggggtcatgttatgtaaagcacaaagactaaaccagaagagaaccattaatttcttgcggggcactggttttaaatcacaattttacacattaatatttaaggcagaaacagattatttattttacaagcaatttttcaaaatgtttaaaatccatttaaagatacactttgctatatgtttcagcaagctcactggaatgttttagtcgactttttttttttaaattttgagttcttcacacttaaagattaataaactgcatcaaggaatgaggccctcgactaagtgtcatgaaggtgaaccaggtatcctgttctgaaagattaatgccaggagacatttatagtctgtaacagtagccagagactcagacactgttattgatgtgtcaggctgagaagagagggctccgcagcaggggtgacaaggacaagttctgtgtgttcatcgatctgcagtctcccatggaaaactccacatatttctgaatgtcttgagtggttttattgatgcagctcctgccagatgagagggaaatcggactcaccacatttatttttcaggccatattggcagtcccacttaagaatttaatacttatgtagatggtgtggaaaggggggagggtattgagaatctcatcaaataaagtggggaagctttttagggaaatttacaaaatcccagaaaccccaccggaatattagaaaaaccacccttggtgcctttttttcgcctgctctaacgatagccctgatcgcctttgttactgaaatcctgctgcaggtgatgaatcaagacctaggaaaccaggcagtggaacaaaactgtcaagcaagcaggtggtagcaaagctgatagaactgtaatatatgtctagttagagactcaatgcattcacagagaagtcaaactagggcatgccagtagattatggatcacaggcctaaggagaaccacagaagattatcaaatcagtttttcctgtctccaagtagggaaatcctcatattatattggaaaaaaatccataatagcattagaattctaaggtattcaggtatttactcatagtgtttattaataataaatcttcaccatagtgttcataatttacttctcatgaaaaccataattccagaaatcctcatttcctcaatcaagattctgacttctctgttctataatgtacattatgatcagtttattagcaagcatagaaagtaatattgtaaaaaaacaaaacaaaacaaaaaaactaacagtgtcatactagccatgatctgaaagtaagaaaatccttacttacaatatttgggagctgagaagagcccaggctgggaatggggttatagggaatctagatgctttggtgatgagttcttgaaagtgactataaggatatagtcttaccttaaaacaaataaggaagcttatacatacaggtatctttatatggaatgagttggttaaattttggagctagatttatgtacgcatatataattatagcatggttatatttaggaaatacacacacacacacatatatgcaaatatgtgtgtaatagcatttattgcaaaaaggagtatcaatattttaaaggagagtacggatgtttatatgggaacatttggaggaaagaaaggtagggagatgtgttatacttatatgataatctaaaaattttagaatatcaaggaataaatatcagtacataaataataataaggaaagaaagaaacaggagctgaatatgctcagtggataaagcaaacattgttcttgtaaaggtcctgagttcacttcctaatacacacagcagaaaacaaaaacaatatatatgtgagaaagaaagagagaaagagaggtctcctctagatataacctatgaaataaactttcattcttaagttttctaaaataaagtgctccttgttactccttaaccaattgaaatgtagctcttatctcaaaataactctgcaatagttaagataagaacactgtgtactataataatgaccttcctacaaggtatgcccattgctgcactagtgacatgaatattgcatattatgaaggtaccatgccattttttgattggatggacatctcacaccatgagatagaagtcatatcgcattatgttaattaggaaaatactccagactagattaggtcatggacacaggagaaacctattggtattgttgtgctaaatcaacagggtattaaaatgaatcctaatgacatattgctacactcagaaatcagttcatccctcataagtcagcagagaaccttcttgtaatagatggttatgaacatagaggcctgcaatgggacagatttccagaaagtgggaaactgtagagagttctcagacctaaattgaatgtctttagttcaccccttcattcaaggctcagggatctatacccatgggtttccatagtgttataaggaccagagctggcagataattttacagaaagtgcatttcacagacatcttgggttaagtgcacataggcagtgtggagactgtgacatcatgcacaagacctgtgcaagctcatgccggacaataatcccagcatgaatgacagaaagtgacagaaagtgggcacaaactgctactctgagtcacgatgaggaattagcttcatatgctgactataggtacatgaactgcattccaagacagccctcatcctcaggagtaaatgttcaacacaggttgcactctgatttttttttctttatagttaagaaagaagaagaatgtgaatctgaatgggttgggaagcaggagactctaggagctggggaatggaaaattatataataaaaatatatgaaaaatctcaacaataaataaaaaccaggaaaaaaaaccatgtcattcatatttttgatattcccattttacatcaattacatcttataataatatggttagaataagctgaaataaatataataagatttaaaaatggaaaactggactgtggggagtttttacttccttagtttagagagtactctgaaatgggaagtcatcccttcctttgttttttgaaattcttctcttcacggttttacccaactctactatctcttatggattcctctatctacatttatatgcatgtaaggcactctacatgattcttctttttaaagctagtccggagaatgttttcaagtccaggtccttgggcatccacagcaatgtttagttctaagctgtacagacatagagtgcatttgtagcatctactcatcttatgttttcctttttacagtttatttacttattcatcgatttaagacttgtgaatcttcaagtatcctcagcatgctggaaatctctatattactactttttccacaggcatctttacagaactaaaaccctgactctgatgtttattatgaaaaactttactggaccatctttgttctgtgtgtcctatgaattcagaaaatcacacaatcagttgtccattgtttcagcattttgtctcttttgggaagtacatcacattcctgtaatattttctgggtagtttcaatgccctctttgctcccaaataacttctgggcatttctacccaccccctaacccattttagttcccaaataatcaacatgctgattaagaagcatcaaggaggtgaaatctagaaagtgttttctgagaccacaaagaagctgtgttccagagttagccaaggttgtaccccaggctatagctcaacttggtaatatataagaatcacccaggtggttgtggttttgaatatatgaaggggtcatgagagcagctgaggcttggtgtgagcgcccgactcgccagcaagaacgatgccacgaaaggatccttctgtacacgtttattgggagagcttgattacttaggcgaaagaccctgagcccagaaatggcgctgcttatataggcctagtagtgacttgtccatacctgattggttatgctaccagtacctcattaatatgcatcgggccaggcagtgactcagcaaaaaactcttatgcacatgcgcactttggttgtttacccataatcatgggtggtggccagtggtagccagcaccatcttgtaatggcgtttgcggcttcccacagcttggcactcagagagaccagtgaaggccattggtgaaggtgctgcttcagttgcagttgttggcccaggtctgaaggggtcatgcagagaagttgagccttgtgaccacgaagagaccttatgagaggctattggcaaagcctagttggagcagaagaccccagaatattggacatatcagcaacataggatgaccaccaagaacagcagtggcagtggagtggaatcaaccagagcctagagtattacagagtgcagagctggagaagtgacctgagccctttggaggaacccaaaagatcatgtgtggatcccagattttggaactaaaagcagtgaagctgaagttgacttggagacgccaagatgttaaagatgacagagctgtgagttatctgctaaggacagctgctaacagggagtggaaccagcctagaaaaagaagtttgttgcagtaaacaaagatgacatcagacatggagatgcagagtttggagtttgctcaactggtttcctgccgtgctttgaagattatatttaagtaattggatgaatctcagaaaagaacttgaaatttggacttttaacattgtctagagtactatagactatggggactttgtaagttagaataagagtatgtttttattattatacaactaggtatggccctcatagactcttgtgtttgagcaagcctatgggggccagggagtggaatgtgatggtttgtatatgcttggcccaagtagtggcactattaagaggtgtgaccttgttggtgtgggtctgatcttgttggaataggtgtgtcactgagtgcatgagtttaaaatttttaattctaagctaggcagtggtggcacacacctttaatcccagctcttgggaagaagaggcacgtggatttctgagttcaaagccagcctggtctacagagtgagttccaggacagcaagggctacacagagaaaccctgtctcaaaaaacaaaacaaaacaaaagaaaaaattaattctagctgcctggaagccagtctttttcctgtctgccttcagaacaagaattggaactctttaactcctccaggcgcatactccttgctttatgataatggactgaacctctgaacctgtaagccagcccctttataagacttggcttggtcatgttgtatgttcacagcaataaaaccttaaccaagacacttatacaggtaggtgagtcatattatttatcagaaataagaaacagtggtaaagaagtgatatggaaagggattgtgagtcaacaggagtttacccatgtctgaaatctcactattagttaggtttatgctctaacttctttagaacttctacactccctctggactaagtagtactttaagatacaatgtccaaaacccaggatgccttccggagttacagctcagaatggtttttctaaacacatactgggaagtcagagctggcttccttttttctgactctacttgggcaatcaactgggagaaaaaaaaaatcccttcttgaggatttacactagggatatgttagtgcagtgttagtaaggaatcaataggtgctcagattacaggtgtgccctgcccctggccacttggtgctgcttttttccaatcctgttggtattcgaggaatctgagaggaagaaaggaaaggcagaagaacaagaagcttaaatgctaaaagccactggagaaagatgaatgactgaattgtgaacttagatgcatcagcactctcaaagaataaggaaagaaaataaggaaatattctcaagttggggtgaaaagttcaaggttttggactgttaatactctttcaaactattagccaaaaatattcaattgctgtggagtgtaatcattgtttgctgtgatgggagggtttggaaagctgcagatgtggggaaaactccttttggatgaacctttggcagcaagcaaggactatatagcatgtattgccaaggttctgaagtgtgggtaggaatagcatccaaatctaaattacagagctgcaagctacaaattcagaaaggatcaccctcaccctatggtaattgctaattaatgcacctctagcagagggaaacccctcttttctcaacatccttcctagagcatagctactgactcccttctctgcagaactctgccagctcagcatgtgcagtgtcttagttgctagagaaacaaccattcctcttggcacctcactgatgcttgatcaatctaccaagaggagaattctcttttgagggaagaagtaacactgtgtgttgcatttaagaatttgatagatgaccctcactcagacactgataaaacttcattattctgaagtgcaaaaactgtgccaaaacatgtgggaggcaaatcaggagtgttccaggaaaactgaaaaacactctactgtacactgaaattttaaaaattgcattccaatggtgctcagatctatgagaagcaaaattcgacagtaatgtgctctatctgaatcctgctgtctagagcagaggaacaataatagcttttataaatgctgaggggccagcgcttcctgctcttgggatcactttatgctttctttattttgtcttggtcacaggcttcctacccttgtcatcctcagattgtcatgttcatctgaggctatcaaattgtctttctaagttcctcctgccacattcttaatgtggtttcacagttaaatgaaccaaaatatcaagccattacttcctgccttttggtctccagtgacttgtacaacagtctgtttttctgtttgatatttgctacagtgatattagatgtcaagggaaaaggagagggagtagagcactgaaatacggcatgcgatattcatgcccaaacattgttactgtaacttttgtcaaaacgaagaggaaaaaacacaatagaatgtctaagaaatttcaactcagaagcctcttattattaattaatgattgaatgttatttttgacactagaagaataaaaaataattttaatgagtactttaaaaataagcaatgcttaactgtgtggagttcttagtaattaagttggtaatagattgaagtacaagactgatgaagactgtcctacagaaattgtttattttgttatccaacaaacttaaaaccatgtggaagtatccaaagtttccacagtgaaagaaaaggaagaataacttaccaatccagatccaatgtttcgcttgaccctatgatccaagatagacatgcaagacatgaatatatgtattagtacacaaaatacaacaggaatgtgcacatacttgataagttgaaacacttctcagttttcattcccataattctttcataagtctatcagatttcatttaaactgtggagttgatcatttgtgagctccaattacaacatccagtatgacagtcggaagagagacgactgccaccattactttctgttctcctttgcattctatattcttttcattaaagtttaggtcaaaggggctttgttatctcttaatttcagaaagatatttgacaaaaacatcttaatatccttatggaaaaagtacaatagtagtaaaataattgtggttcaatgtttaaaatattttattgagaagttcatacaacatatcttaatcatattcatgatttaattaacaactaatactgtcatcttatggttttccatatctggggaaaaaaggggatttatatttctatgcttggttcaatagaatctagctgatcattgctaaccactaaaattatatgatttgattgattttaaaattcatacagctttcttaagaaataatctctaatcacgagtcacatttatccaaattgattaaaaaacaaaaagcaacaaaaacaaaaacaaacaaacaaaactccttctgactgatgtttttaaaatatagcctggtcctgaaaatttgttctcaagactcttaccatatttaaaagaaatgaaatgactcaaacccaaaacaccgtgcaggggaagtcccatgtccagcagttgatgcccaacacaaaataattgtaataataataataataataataataataataataaatggtatttttagaggttatttttctcataatattgtgacatgtcttgcttgtttgtttgcttgctttatcaagacagggtttctctgtgtagacctgcttgtcctggaattcactttgtagaccaagttgacctttagttcagagatccacccaatgcctctgcctctgaagtgctatgattaaaagcctggctgttttgtttgtttgtttgtatagtttgttgttttgttttattgtattgaaattcctctgtgcctgaatatggatgtctctacagccatttgtttctttgggtgtcatatttggctcctcttctctttgttagttttgtcctattccaacttgtttgcttttgtttttatcttattttatcattactccttatattactgttttgttttgttttttccctaggacacataaagtgtgtgagtccagataggagaaaggaggtggagaggacctgagataattcaaggaaaaagaatcaggaatccaaacatattgttatggaaaaaagggattttcagtcatagaaaataaataaataaataaataaataaataaataaataaataatgcagctaagaaattacattatttaattttaaacgttaaaatctttcattttatactctatttttaaaattagtaacaaaaatgtagaagttttaactcatttaagttatcagcaataaatttgttataacatacattaaagagattcatgaaaatatctattcttaataaaatgtagtgatgagtatgcttttaaatgagaactattttttttttgttgttgttgttgtccttccttatccagtctattcaatacattgtagatatgtgaaaaccaacaagtaaacttttcttgaaagctaattttcaggtatagaatctgaaaatataccagtggtcatctcatcctttgttcctgtataactgtaatgatttcagacattagtgatttgtactatattagctaaatcagctgtacagacctccaaatgtcagcacacttcgttataaaatcctatcaatcattgactgtcaggttttgattttgttcaggtgacaaactcacttcaaaagtatttttctcttttagaaatgtttgcagagcagccatattgaaagtctgaggagtgtacccctttttgtgacataagggggtgctttgtgtgtaaagaaactagtgctccccagtttactgatgtgtgcattttgtcccttccttcaaccttacacttcatcaaaaaagcaccaaaaagatacgtattcaaaaaacaataaaataataatttgtagactttttccagggttgatttttcctgcgagtccttttcttttcttttcttttcttttcttttcttttcttttcttttcttgtcttgtcttgtcttgtcttgtcttttcttttcttttttttcttgggggggggatccatttcttatggtatcaacctgtgggtgccaagaaccagccttggcttggagaggggttcctgagagaagggatgattgagagcagaaaaagatctcaaagtcagttgaggaatacaagctgacagctttctctggagatgtccagacaactcatccagatagctcagttctcacagaacaaggcccaggattttatttacatatcaattcagtcaggactacattgatcaatatgtgaagacccattcatttgcagatgcagatgcttcatcagcaaggtcatggactgaatgaaaagagagaagacactgagtatagatgcaatgttactagattttgcaaggtcttgccactgtgacttctccatcctgacacattggaacaacactgagctagaacaatcccttccatccttcacttacttttcacagggtattttattacaacaagaaaaaatagctgagacaatgtgaataatgacgtttgttttttacaactctgaatgacaatataataactttcatgaatcacatgaaacacatataaagattcatgtttgcaatattactaaaacagggtttggcacagaacaaacatttaaaaccctcctagtttacctgtcagaaagtattcattaaaatttaacttgcatagtgagcaagacccgtattatatttcatgccttcataaagagaccctgaatttggaatttcaaatatatgttaaatagttctatgttgtttgagactctaaatgttgaataaaaagtaagaatggctttgaaactgttattcctgagtgtattacattacatagttacatagctacatatcagtttagagataatcagaagtgatataatacaactatccagttctcagaaagttgtggattctgatcaagacaacccataatggccagctatcaatattgagttttgtattagtattcaccatggatcacagaggttatattcaatatttattttgtgttcaatgtatctacaggtaggtttataggaatattaagtcagagaaattagttgatttttacagaccactggtggatttatttcatgccctctcaatattagaaagaaaacaactcctagactaaaattgagaagctcaggaaatagtacagcctttctattctttgcttcatggaaacttgataacctttacaactcacactcagagttcttgatttcactgtggagctggcaacgcgaggatgagtgggaaggggtgaaattgaaaataatgatgaaaaatatcactgtctcactcagcatatttgttacaggagaaccttgagtcgctgctgctaacattgagttttggttgtttaactgctttcctcctgtgagccagcatttcaggcaaccaagtatctgtggtgaagaagctggacttgatcttgtccttcactctttcaaaagattcacgggtcaattatcttagtaaaatctcctaagcattaatgctcacagaggaagaaagaaggactcagctggattttttttcaatcccaagggagtttgtggctttggcacttagcaaatgctcttttaatttgcttgctatggaaattcaattgaagcatcatgaagagaaaagagacccgtgtgaagtggtcagtcagctgtcgttgagctctcctccctttaaaggctagcttgggaaacaatgatacacaataagtacatatcattcagcacaggagttcatagtttttgttttagaaagaaatttttaaaaagatatgtgaaaagacactgtctacatacatactgctttgaagtggcagaagatgaacaactaacataacgtaataattctgaggacagactcaattaaaaacctctaggtgacattagaattctgaatgcagcataccatttgtaaaggcaagatttgtgaaaaactcaaaaagaaaaatttcagaagtggatgctcacagtcccccaatggaggaactaaagtgcccaagaagctaaaggggtctgcaaccctataagaggaacaacaatgtggactaaccagtacctccagagctcgcgtctctagttgcatatgtagcagaagattggcctagtcggccatcattgggaggagaggcccttggtcttacgtaggttatatgccccagtacaggggaatgccagggcctggaatcaggagtgggtgggttggtgaggagggtgggggaagggtataggggacttttgggatagcatttgaaatgtaaatgaagaaaatatctaataaaaatgttaaaaaataaataatgaaaatttataaaaagaatatcaaaaattttaataagcttccaaaccagacatataagaataaatagaaactcacaattttgtgttagctaagatatgacactctgttgcaagccactcatcaatattaaagtggtacgtcttcacaggtgttggatattcaattatttggtttcttgagtctcccaattttgagtttctccctgagagcgaactctttattctgcacatgcacgtggcaaagtggtggcgtttggcgccagctgtggagcagcttcctcttctgccatggattatatgtgtggcccgagggttgggctactgcatactttcctaaactactgattcagttacagtgtcaacatggtaaggtttcctaattgagaagaaccttgtgagatgtaaaaatattgtacaaaacattcttggcacagatccccagaaaacccgaagactatcaggctaatctaactcattctttttatatatatatatatatattagatatcttctttatttacatctcaaatgttattccctttcctgctttccctctgaaaaccccctaacccatctcccctcttcctgctcaccaatccaccctctcccactttcttgtcctggcagtcccctacactgaggcatcaagtcttcacaggacctagggcctcttccccaattgatgaccaactaggccatcttctgctacatatgcagctgtagtcatgggtctcttcatgtgtactctttggttggtggttgattccctggaagctctggtggtactggttggttcatattgttgttattcctatggggttgtgaaccccttcagctccttcagtcctttctctagctcctccaccggggaccctgtgctctcagtccaatagttggctgagagcatccaactctgtatttgtcaggcactggcaagcctctcaaggtgacatctttatcaggttcctgtcagcaagcactttttggcatctacaatagtatctgggtttggtgactgtatctgggatggatccccaggtggggcagtgtctggatggcctttccttcactctctgctccatactttgtctcctctagtgggtattttgttcccccttctaagaaggaccaaagtatcactcttaatcaactacttaccccaagtcagctattaatatttcttctttgcatcatgaatgttttgacagcttggcaactttctcacacttatcaattttgtatttattcattaggatgattcagattaaataacaaatccttcattaattttgtggagacattcatctacaaatatacacatgaactcagccatgtactgcagtatgatgtgttggtctggaacagactaaaaagatgatggatggcaattttataggactgtaaaagaactgaacaatttctattaagcagggattgtcttaacagaaaacatttactaagtatcatggtcatgctgttgtagagctataccactgcaaataacataaaatagatcacagataattatatgtagcatataatatttgagtaggatgatatttctgttatcattttctgcaatataattttatagttattttcatttgtacatttatattattaaaatttattacattaaaacagtgctgtttatacgtgtagcatcttgcctttataaaatcttctttttacattattttctcttgttttgacttagttaatgctcattgactataggctttgtgatatatacgatgtattgtctgcctatgtagttggtgatactctctatgtctctgtaagtatactctgaggtatttaccttatgacaaatttgtaagtataattttcaaccagggtttatttttcattctattctgtttaacaatacataccattgtaaatgtgtattattacatatatagatagatgaatttttttattacaaagtattcttgtcctactgagtaatgataaagagagaacctaaactgtatttctgtccttgtcttactgattccaggcccaaaatggaaaggtacattgcttaaatcaataaattataaagcacaacttcctattcaaaataattttatcacctctttccaatattaattccatttctcttatttgcaaatttgtcacttattgaaataatgggcaggcatttctttaccaattctttctttatgaacaccactaaactgtattttccattattttcatgccctactctgaaccaggtatctttttctgagcagtgtttttacattgggtgtatttttattttgaaataatgtctgacatatgagaaagtttcaaggtacttagaaacctcaagcaaattcatccgtttcacttatgtatgacaagtgttttattatctcactgtacaagtgtaatcacacaagcatatatagtcagaattggaacaagtacatatggcttactttgttctcattggagagaacatcattttcatagtatcctttcatttcttaacacctatccacagtgtagttatcaaggtgaggatacttaatattgtcatagtaatacctaatccacagctttaccagttactccaaacatcctttatagtttatctacattctaatattaggtcaagcatatttacttggcaggaagttgacaacatcttgtccttaatttccatagcttcctcaaattgagttttaactgctttttttttttttttttttttttggttttctctaagggactgaattatttcaagggaattacattatagttacattatagtctattgttactctctcatctaacatataaattacacttactgtgtctttatcatgagtgaaaaagtaaactaacaaactaaatgaagtcacaaagatataacaaaattttctgagcagatttcaaaattatcaaaacaactatattatagacagagtattatttttatgctacaaaataaaaatgttattgaatttatactacagaggacatttatggttctacaaaggtttatccaagcataattttgaataatcacaacttctctttatcatttctttactaaatgtatgtgggaagataacaaaataagtgaaccaatatatatatgaagaggatcaatttagagttgaataattactacctaaatactcatggttgacatataatggaaaaacagttgctattttctctgcttataatctttgaagtaaattatgaaatttatacttataaatacaaagatattttgtgttagaagcctatttgataaaagctaattagcttagtgataaatgcataaacaatttccaaagcatatttgtgaaagcaagtagaatgctaaataaaggacatttagggagtattaaaaaccagaaaattgtatttacgatagttaaaacaggagtggcataagaaggtaaagatggggaaagggacataaacgggaagagagggtaaatatcctgaggaaatactagggtggtaaggcgggagtggatgggagggtggcagagcaccttcatagaagcagggtgagggggggatgggatggggtttgccacagcagaaaacaggaaaggggataacatttgaaatgcaaataaataaaaaaaatgaaaatagatgctaaaccacaaaaccataactctctcctttagtccaataaagcctctttgctctcagatataacttgaacataattataacaattatgaatataataaggcatgatataccctataacctccaacccattatatttgaaaatttaggaaaagtattctatcgtctattctaatcagttacaattccgtccctaaaatatgtttgatttcaacttgcattaccatctgaaaactatccatttgaatctagaatattttctttaatggtaaacagcttaagctcaaatgtgagactttaactagtctgaaatggaaacttctagttcttaggaaaattacatcaaatcacggttcgctgtggttcaggtgaaggatgtcttggcaaagcaaacacatgaaagactctttttctgaagcagacacaggtgaaaggatgtttgaatctagcagacacatgaaagggcacttaatgaaggtgtagaaatatgacccagaagacaacgagagacaagcactgagctttgaattgatttgctccgcctcactattcttcactaaagacacacatgctatggttcaccttacatagcattattgagctcaatttctgataaagctgacattgagagaaactcacccaagagctgatcctcaggttcctgtggcagcttgccacttccagggccttatctcaggcctgttagcaagcctctcggttcctcatggttgagctacagctactggtttatgcctggtgtctgtctgcctaaaagactggtctgctcctgctgaatcatatttggggtttgctacagaaatgagctgctgctgctgtagattgaactcataaccaaagatctatggctgaagaggcccacttctgccttatcctaataatttttctcttctgctacctctgttgggtggtaggctagacgagaggttgaacccttattaaaagttgattgtgtctgtaaaaaaaaaaccaaaaacaacaacaacaacaaaagattctgagagaaataacacaagctctggtcaggtaaagacagaagtataagcaattgtagagaaggttttgatggtcaagagaactgagaattcataggagagttctaggttcttgcaagggaagagacgaggcattttgaatctgagttggtgagccacagaaagcttctgaatagtttctgtttgatgtgaagaaagattccgtggagaaaagtttagattctagagtgaatgcctcctgtatgtagttcatagaatatgtgagtgaactaaaatgttttattaatcaactatacatattactattatgtatttattttaaatgaccaaaagatctcatagatttttcattgttatgagattttaaggagatatttgagattttataagttggtcaagacctttgagagttttcattctacctctgtatgccggaaaactgcagaaaaaaagaaagttttcaaaaagtagaaaaaaaaggggggggggaatcatagcattgttcccatagttgcagttgttactttcttccaacatcagaacaaaattgcaaaaccaaaaagataaatttatctttttctagtcagcagtaagttagaggaaagaaaagcaatagacttgcaactgcatacattttaatgactgatttattctttctgaaatgtgtagaaggaaggaaaatgtagttcaaaagacaataaaaacaacttgagattttaatgttttcatgccaaactacgccattaggaaagaatcttgagacggatgaacaagccacatatcccacttacatcccatccttcttctcactttgtttccttgcctttcaaaacagggtgcagccagggttccattaataagcatcaaagcgattagttcttttcctgtgtataccctactaggttttactagagtttaatggggttcttgatgtcagattttgcactcaactatcatactattatttccaccttggagtaggaggatgcaatctctatgcccatgagcattcctggttcagttcaaactttgtcatagttcagtatttatggggattgtatgtaaaatttgcagcaatacaacaccctagacaaagtcctttgcattatttggaggagactgttgataatctaagccttgaaaataaaacaaaacaaaacaaaaacaagatcccacaaacaaacaaacaacaaaactcaaaatgatagccttctctccaataacccatttctttctctatgtgtatacatgtatatgtatatatgtatatgtatgcctgcctatcctattctgtttaagctcataaagagaatcacagaccagagtattcatgaaccacctgatactggatcatgctttcctaggatttttctcttttatacttccatgttaatttgttcattctagggatacaagcctaaatatatgatatatggcatcacagttgtactgttaaacagtcttttatcatgtggtaactttgttcatctttacggaaaagtattttctaatgtaagagccttgcctcacagcaatgggaaagtaggtcctgggtcttttggagttttgatgccccagcataggaggatgctggagcggtggggagggtgaaaagtgagtttggagggtggatgtgggatgggcattggtggaggagtaactgggaagtggtatatcatttcaaatgtaaacacatggactgattaataaaagaaataaatagatcagagtcacaggtcacatttaattacttaactttgacttttgttttttgagaaagagcccccccctccgggctagcttgaaacctgtaatgtaaccctggatggccttagacccctagtcctcctgttctacctcccaagtgcaggatttacacatgtcttaggctttctattcctatgaagagtcactatgaacacagaaattcttataaaggaaacatttaatggatgattggcttacagttccgaggattagtccattatcctcatgctgggaagcacagtggcattcaggcagacatggtgctagagaagtcgctgagagttctacatcgggatctataggcatcagaaatggagagtgagccactgggactaggttgagtttctgaaacttcaaagtttggtgaccaactttctgccaggggcacacatcttaatagtgctacgccctatgagcctatgtggacttgttgtcattcaattgtcataacaagcatggatgagcacgcaaagatttaaatcccagtattaaagtggaattattaaagtttaaaatattgaaatgctaaaacattaaaatttctctattcttctatatctgtagtgcacactattcaaataatgatatggctactgtgttagatggaactgataaggaacatttccattgttataaaaacttcacatgggtaactctgatctgtgtaaatggtgaccctcgatctgcagtttcttaacttcctagaaattcagaatcttaaggcacagatctaatcgccattttatggtataactggtgaattaaattcacagtaaaatgtataaagcactgctctaccatgtcatcttacagtgcaagcatttgctgagtggataaacaaatggatgaaatgatcttcatttggtttacatgtgagcaaaaaagtcttcagaatcaagtgtttccactttatattcatgacaaattctgctagggtcttacgtttgcaaaatggctatattttaggagaataaatgaaggattaggttatgtaaaatatgagcttgatatatggctgaatgaagtattttacattttccagccactgtttctgtcttccctattcatcaaactatgttagcatgtctccataatctgtatttgccattttgtagctgctggttctaagactgacagtcacaatgatgttcctagatgccttgagagaacacggcatgatttatctgtaaatattagtgcaaatttagtcatgagtaatttatgttttattggatgcatattggcaggatgtattattttctcctctatttagaccttgagggagaaaaagacaagctggggcaaattctctctttgtgcagaagctattatagatattaatctttaatgctttggtgtgtaagttgaagagattgtcttgaaatgagtatcgtcaggggaaaaatccttgatacttgtctgtgttgatattatcactctggctaatggaatgttgtagctactttgaaaaaaattgattgttttttaatttcctattacttgacctatctttttcatgggggcatgtactatctgtatgtggctcatcactgggggctgaaggtctcaaatcttttacatttactaaagttcctgcaattgtattcttttgagtgtgaatgcaaatgtatgtatatgtgtatgtgtacattcctgtgtgtgtttgtgtatccatgtacatgacttctatcccaccttaagaaaactttttttaggttttaattatgagctttatgcacctgtgtgggagaaagcaaacaaaagaacagatgcatgaggactaaagggcagtgtttcaagtcccttggggttgaaatcatgacccaccatggatgttgggaaatgaaagcaggtctcctggtggagcagcaaatttcttaaacaatcatccatttctgcagactcttaatgaaccttatatctgactattttacttgatgtagacagatagaaaaataagaaactacttgtggaggggatactgtgcatgggggcgggggcttgcaatcaataataatgctctgcagaaggcaggaagaatcaccagcacttgctaacaatggattttagtaaacacatgtatgtcagatctagatagctatgtttgcacaccatctctgggactatttggtctgtagcactctgttctcaggcataaaccaaaacttttgcaatctttcatagttctcttttaaaaagttaaataataaaatatatgttggaattaacagacacatgctttgccatttattagttcagtaatggtcactccatgtggaaaacatttattgtttacctaggtaagtatcattacaaaaggaaatctcattcttcatgtccttacatctctgtgttctctctcactttttttatctctgtctgtctctctctctgtctgtctgtttctctctaactctctgcctccctctttttgtctttcattagaaaacaagcagacatctaaataataaaataaaggaaaaacgaaaaataattcaaaatacaacagaagcagaatggaaagacaagtaaatagcacatggaccacttgaagacacagagacacacatttgcagcaccaaaatcctaatagaacacaaaacaggcgctgtaatatatacactaagacaaataaggtaaacaacaaaaacaacagtaacaactcaaacaacaagactaattaagtgagaaaaaaaagtatcctgaaaaaaacattatgagacaaagaaactccaaggataccatttagttagttttctattggatatctacagctgggcatggggcctgcccttaagtgtggtttgtgtcccaattgaaaccctgttggagaaaattaagtttcatttgagagtggttatcaatttgaaacagcttctgacctagggcagaggatttgtatttaagtctttcagttctaggaccccatctggcacagacctgtgcagcccctgtgaatgctgccacaatcccagttcacttgtacaccaggactaggatgcttagaaggccttagttctttgatgttctttatccactctggattccttccacctcctcttctgaagatttttctgagtccagggtgagggatttgatataggtatccaattcaggactgagtgttccaaggactcttgctctctgcacattttctagctgtgggtctctgtatttcttcccatctactgcatgaggaagcttgtagcataggaataaagagcaattattaaatgtgatttcaagaaacttagaagaaagttgctttatagtaaaggataccattattcagataaagtggcaggctacaaaatggagaaatatttttaccaattctgcacttaatagatgaataactagagaagtcaaaataaatccatgaactggacattaagaaaataattccctaattaaaaatgagatacaaatatcatcagagaattctcaaaaagcattcaaatgactatgaaacacataaagagttgttcaacatccatagacaccaggaaaatgcaaatcaaactaatttgagagattatcttatactactagaaacatccaaggtcattatcaaatgagatcttactcggagaaggatgtgtagtaatgtgaagattcatccacagctgccacttgtgcagccactgtggagataagtgtgccagttcttcaggaagctgacacttgttctacctcaagatctacttatatcatccagccatatacacaaaggatgctttgtcctgctacagagacatttgctcaaccatgtagattccagctttattcatcacagaaataattggaaacagagtagatgtctatcaacagatgaatggagaaaataggatacatctatacaatgaaatattcttcagccattaaaaatgaaatcacacacaatatgtactcactgataagtggatattagccccaaacctaggattcccaagatataagatacaatttgctaaacacatgaaactcaagaagaatgaagactgaagtatggacactatgcccctccttagaattgggaacaaaacacccatggaaggagttacagagacaaagtttggagctgagatgaaaggatggaccatgtagagaatgccatatccagggatccaccccataatcagcatccaaacgctgacaccattgcatacactagcaagattttatcgaaaggacccagatgtagctgtctcttgtgagactatgccggggcctagcaaacacagaagtggatgctcacagtcagctaatggatggatcacagggctcccaatggaggagctagagaaagaacccaaggagctaaagggatctgcaaccctataggtggaacaacattatgaactaaccagtaccccgtagctcttgactctagctgcatatgtatcaaaagatggcctagtcggccatcactggaaagagaggcccattggacacgcaaattttatatgccccagtacaggggaacgccagggccaaaaagggggagtgagtgggtaggggagtaggggtgggtgggtatgggggacttttggtatagcattggaaatgtaaatgagctaaatacctaataaaaaatgggaaaaaaaagaaaatgaagcaaccctataggtggaacaacaatatgaactaaccagtaccccccagagctcatgtctctagctgcatatgtatcagaagatggcctagtcggccatcagtgtaaagagaggcccattggttgtgcaaactttatatgcctcaggacaggggaatgccagggccaagaagtgagagtgggtggataggggagtgggggggacggtatgggggacgtttggaatagcattggaaatgtaaatgaggaaaatacctaataaaattttttttaaaaataaaaaaaagtgaaatcataaaattcacagatgaaatgatggtgctagaaaataatcacccagaaagagataacccaggttgataatgacagatgtagtatatattcaaactgaaaaagacaaataaggcatatattcaattataggtggatagtatctgtacagtctttgataagaaagctattccatataaccacagatattaggtatagagtaagggactacaaggaaggagggatgtccctatgaagaaaaggtataatagctagtttaatataatataaaagtataataagaggtgtgggaatggaatgggaagatcaagtgggtatgaggagagcagacggggctgatggactgaatgaagggaggaacatctaaagctgagaggatttgaggtgccacatggaaacctaacacagtaaaacttcctaaaatatacacctgccattaggtcctacatgaaggcaacccaatggatttacaaatatcaaggatctattcaaaaagccttcttttgccaatgcattcaagtctacctactttctcttctatcagattgtgtatcttgcctaatacagaggtctttattaaattggagctatgggttttttgtttgtttgtttgtttgcttgcttgcttgcttgtttgtttgttttggattttgttcaagacaggctttctctgtatacctctggttgtcctagaactcactctgtagaccaggctggcctcaaatgcagaaatccacctgcctctgcctcccaagtgctgggattcaaggcatgcaccaccactgtctgtctggtgctaagttttgaaaaatatgtatctgtttgaattattctgtatgcagccatccaatttgactagcaccattcgttgatgttatctttttcccagtgagtatttttgaaaatcagttttctgaaggtgtgtagacttagtctaggtctttatttcagttcttctactcaacatgtcttttttgggtcaacatcatgatgattttaatacagatttatagtatagctggatatcagctataatgatgcccccccagcagttgtttcttccttcctttcttttttttttgatttctttttttattagatattttttatatacatttaaaatttcaaatgttatcccaaaagttctctataccctccccctgccctgctcctctacccactcactcccacttcttggccgtggcgttcccctgttctgggacatataaagtttgctagaccaagaccaaggggcctctcttcccaatgatggtcgactaagcaatcttctgctacatatgcagctagagacatgagctctaggggtactggttacttcatattgttgttccaactatagggttacagatcccttcagctccttgggtgttttcactagcttctccaatggggaccctgtgttccatcttatagatgactgtgagcatccatttttgtatttgccatgcactggcatagcctcatacgagacagctataccagagtcccttcatcaaaatcttgctggcacatgcgattagtgtctgggtttgatggctgattatgggatggatccctgggtgaggtagtctctggatagtccgtcttttcgttttagctccaatcctatatctgatagaggacttatatccaatatatacaaagagctcaagaagctggactccagaaattcaaataaccccattaaaaatggggtacagagctaaataaagaattctcaactgaggaataccaaatggctgagaatcacatgaaaaaatgttcaacatccttaatcatcagggaaatgcaaatcaaaacaaccttgagattccacctcacacgagtcagaataattaagataaaaaattcaggtgacagcagatgctggtgaggatgaagagaaagaggaacactcctccattgctggtgggattgcaagctggtgcaaccactctggaagtcagtctggaggttgctcagaaaattggacataatattactggaagatccagatatactactcctgggcatatactcagaagaagttccaactggtaataagaacacatactccactatgttcatagtagccttatttataatatccagaagctggaaagaacccaggtgtccctcaacagaagaatggatactgaaaatgtggtacatttacacagtggagtactactcagctattaaaaacaatgaatttatgaaattcttggacaaatggatgtatctggaggctatcatccttagtgaggtaacccaatcacaaaagaagtcattagatatgtattcactgataagtggatagtagcccagaaacatagaacacctgagatacaatttgcaaaacacaagaaaatcaagaagaaggaagaccaatgggtggatactttgttcctccttagaatagggaaataaatgctctttatttttttttaagatttaatttattttatgtatatgagtacactgtcttcagacacacagaaaagggtatcggatctattacatatgattgtgagacaccatgtggttgctgggaattgagcccaggacctctggaagaacagtcagtgatcttcactcttcagccattttccaggctaccacccagcaaacaagtttcagggccagttctaccatgttcatggtgtatgcccttggggccagttcccctgtaacccacacaaatagggccagctgtattgtgctgcccagatgagggacagagccaaccctcctgctctcatgaaccagaggccagctctcctgtctatcacaggtggtgaggggagaggtgggataggccatgtcttcatcatccttgcaatcataccacatagcaaactaatgacagagccagctcctctaccctcaaacccttggtcagctcacccacaactcacaaactaaggccagctctactgtgtttcctgggagaggaatgggcccattcttgagtttcacagctaatgataggctgggcctgctttcctgttctcatagctttggagtcagctcgtctatgatgaccatgtgagagatggggcctgttctacacagcccctagacatcaacatgtccccacatggcagccagagcaggaacatccacctgacctttggtggtatctgaaacagatccctactgctgcagggccacaaaccaagagaagaccctgggtgacagaatataccaagacctcatcatgaccttgggggtataccaggtatccacttcaggctctgcttcactatcctggactctccacttcctcctttactcattgtgcatgcatccttctgtttctctttctcttacatctctccacttgctcacttagtggcaccaaggaaatctgggtgtttgtgggttatctcagtagttctatgacaattttgtgcaatatggcatcatattggggggcatctcaggcttgccttgcctgcccaggccatgtggccctggtcagtggtgatcttgtgggagctttgcatgatgctaggctaagagtcatccctcctgaggcatgtagcaccaggtcaactccaattcttaaaattatgtatttatttacttatttttagaagattcattttatgtatatgagtacactgtcactttcttcagactcacaagaagaggacatcagatcccattacagatggttgtaagccaccatgggaattgaactttgaatctctagaaaagcagtcagtgctcttagcttctgaaagatctctccagtcttctctctctctctctctctctctctctctctctctctctctctctctctctctctctctctctctctctctctccctccctccctccctctctccattatttagtgttactgtagactgaagcccacatcactcattcactgtaaatcagcacgctgctgtgagaatctcgatttgcacattttaaatgatgaggttaaggagctatcctaactcatcttcagttagaaagggggattgagattgatcttgtactgaaacatgttaaaattacagacgcattgcattgagttctgagatagaacagcggtctactttctgactgactaaagactaaaatttaagaatttgggaaattaccccaaagaaagattcttctgaatgacaatagcccatgttagttttagccacattaaagatttatggaaatgaagttctttgagtaaaagatatcctaaattaccttgccttttttcttgcatcaggtgggaaggaaaaaaagagcacattgtagaatttgtatgtataaaaattcacttaattcacataggactgcttatctgtacttcccaaaacttttcactacaattcaagccacagccttctaactatggctgctttgcaattggcttcatggaaccacagatattctatagcagtgatgcagagacatgaagggaactgaggaaaggatcccaagactcctagtgcactgtgcattcgacaggggctcttttactgttagagaagagaattctctacagttgatttcttcaagaaagcaagatatttttgtaaatgtaggtaaatccctttccaatttctctccaaaattaagcagttccagttctagcgttgttgtttgtttgcttgtttgtttgtttgcttccattctggttccattagctgaatgtctactgcaaatattagccatatcttaacttctggttgagtattctaattagaatttatatatatatatatatatatatatatatatatatatatatatatgtacttaatcctataaattactatgatggtggtaattctttagtcacctagttcacaaataacttttaatatttcaaagcttaggccttgtctgggcagactctgaactagctcatctaagttaatgcaaacacttagccctgcccagccactgtggctagctataccttccagttgtgcagtcacatcagtctactctcatatctcctagtgaatggcacttattccttcttcgcagagttattttctcccttccagaaaggcctgctttctactttctgctcagctaatttgccatcgtatttttattaaaactaattgaagagtgccttaggaaggtgaggaaggacagagatataaggtcacatagtgtacttcaacatttatactttcaaagtgataaatacaccagatttctttttactccttcattagactgacttgagtaattatccttatttgctgattctacaatctcctataactatttctgagcccccataattctaaggaattcttcaaggaaaattttcataatcctagaggagtaactgctgccttctctgtcaattgtctttgctctggttagcctttttggtttttgtttgttgcaattatgttcctgaacatatgcaagactgtcttctcattaattaggttctcaactaaagaaaccttatatcaatatttcttggtcaatatacatgcacaaatacccaatataaacctacaacaattatcatctatagatgtgagaacaattggaagactctgttgattttaatgatattacttagatgtttggagtccaatgactgtcagatgatatagacttgctttggacggagaaactaaaacactccagcatataacccctggccctatcatcctccaacatacaaagaatagtctcacaacatcagaagacaagggttatactgaatcataagcttaaacctggaagactttcttttttgtctcatttttggtcaaaccaaaatacatatctatgcttagtcagagtatgcacaaaggagccctcacaaagtttgatatccttgacagaaagtgaggaggagacaaagacctaggattcctacttctgtgtactctaaggtcatgcagaagaacctcaagagatattctagatttgcttaaggatagcagaaatatgtgagtgtgtttatctgtgagatgcttctgagaacatgaaaaatcctatttctctcaatacgttttgatgttagagtggaattcatgctgttcttctgcttcaattcatctttgcatttacaatatacttaccagatattgatgtggtcatgaataacttgacttctcacctttatacatataataactgaaaaatcattgagcaattagtgagtcgctaatgccttaggactttgcagagctcacactactaattacaaactcatgctcaattaagcccctgaatcccctcaaccccagtatcacacaaaagtattcttcagagagctatcaagccctgttttcctcatgcttagggaacatagcgtaaccacattatttttttggactttctgactctaaagtggctaaaatgcttaaaatttggaaaatttcactctgtactataaggaagagatacaacatatcacatttacatgcatagtaacatgcaaatgtatatacacatacacacacatgtagtcatttgtgatataaactatgtaaaaagatacatataacatttataaaacatgaataaaactgtaattcataatgatagaaattaattcatagtagagcatccaaaattactgacaattatttttgtacctaaatatttaaattcattcacagttttataaatctggttttagaaacttgatttttttgattaaaaaatccattagttttatatgttgcatcatttatcttcataataaataaaaataattggacattagctatactaacacatgggaagtactttttacattgtcagatgctgaacaagttcgtgtctacaaatgatgtggaccaagagacatactggccacagacatgacatcaaaatctgaacaacaacaacaaaaaatcatgagggtgttatcatttctctaagataaccacagacaatgtctgaaggacaaattcgaagggcacatagagtccatggctatacatacacaaaagtcagtctgtgtaagccaaaccagaaaatcatgaaatgcaaagacaggtggggtgacagcaaggaaaagttgcaaacaacccttcctaagcaacacatgatgaagactagaatactaaaacaaacaaacaaacaaaaaaaccacagacatctagagagaacatgaataacaaggatagcaaatatgtcacagatgattggtgtaggtgctgccatcctgaataaagaaaataaagagtcttagagttataccatgtctccaaagtagtagcactagacatcgtgggagagcctgctttaattcattcattcaaaaaacgagaaagaaaccaattaattaaatgtcctttttactatacagaaccccaaactgtaatttaccattttttccccactacaacagactctagaactgctaagtgtaaaaacacaacaaaccattattaaatcacattgtcccaaataccaaatttagcacattctcttctatcatatatcatccttttacaaataggactgaagctgaagaagtacgtttactgtagtatgatcatacgacttgattagcagcaaacaaggtcccttaataattcccaattgatgggatgataagaagaaaaaagtctatgatttgtgatattgttctacttagatgactggaggaccatgggaaatcacaatacagaaaaaaaaaaagtgaagtattgttgtggccggccagcagctcacaagtctgggttctagcctgggaggcagcctggaatctggaagagaagagggagctaggcgagaaagatgaaaccaagacaaaggtctgatcaaggttcaattttactattccgtgcacgggttaagaagaagggggaggggccaattcccaccaaatcatccctggagtccagtttcaggtgaccacttgatagctccggaacacctaggtggcaggcagtagcagtgggagtggcagaacgatagggtggcaggctccacccccaagctctcttcttgataacagtgaaaccagatcagacaggtttcaggctgagggggggaggttacaaagtatgtttagaatgagtgaagggttgagctagtgagcacaatttatctaccttcatgcacctacaatttaagtactcattaagcttccataatgcttggatcaaaaagtttagacatagtttgcagaatctactacagcctaggtccaaagccacagatctcctataggtttctgtaactgtgccaatcagagggacagcttctcaagccaaaattgcagatttaataagagccaggaaacaaaaatgaatggtgccaggaaacaaaaatgaatggtgcaagtatatttatgcttttgacgaagagccagcatgagtacagtagccttatattcttgtacttttggcaattttcattttaattattgttggttacattctagaggagtttttttttaattttattttttactctttcactttacattctgctcattgccaccctcccagttgctccctcctacaatcctcctcctatcccccaaccccttctcctctgagcaggtgaggcatccaagtattccccaaccctggcatgtcatatctctgcaaggctaggcacttctctcccactgaggccagacaagccagcctagctagaagaaaatatcccacatacagacaacagcttttgggataaactgtgtttcaggtgttcaagtcccacatgatgaccaagctacacatctgatacatatttgtggagaggtctaggtccagcccatgcatgttctttggttggtggtttagactctgagagcctcaaggctctaggttagttgaatttgctggtatatcttcagagttactattcccttcaggtccagaatgcttcctcatatttttcctgtagatgtccggaagttccagctactgtttgctctaggttagtaatttgctggtatatcttcagagttactatccccttcaggtccagaatgtttccttatatttttcctgtaggtgtccagaagttccatctactgtttttctgtgtgtgtctgtatctctctgagtcagctgctgggtggagcctctcagaggacaacttgctcctgtctgcaagcataacagagtatcattcacagtggtgttagggattggtgcttacccatgtgatgcatctcaagttgggtcagttattggttggatattccataaatctctgcaccatccttcctccaaaccagtattttttgtaaacaggatacattttgagttgaaagtttagtggaagggttggtgtttgtactgatcaactgaggttcctgtctggctataggaggtggcctcttcagaatccatatccctaatgcagtgagtcacaggtaaggttatctttattgattcttgggtatctgccttatccgaggtctctgtctagacctggagatgccccctacctcctcacccccatcagttgcagatttccactcattttcatggccatctagccatcttgaaaagaaaaatctttaaagcaataatgttcttgtgcttatactcttatagaaaaattagtcatgcttctgaaacctggaacaagtttgcaacaaatttggagtaactctctaggcaatgtatcacacaaacagcatttgtatgtattgttcatacttatgtttgttccatgatccatttaataaaactttataagaattatagcatttgtcaataccttgtgtaataatgactgaccatatgaaagtcaagtgactacctggtaactattggaacatgcaaaattattatattatcatttttaatgtgctaaataatacttgatgtataaacagtgtaactctaagtcatgagtcaaaactcattctttgtccaatcctctatgaaaacttaatcccaatgatcttggcccaccttaattctcattcctttctttaatgccaatctaattatttaaaaatataaatcatttcaatcttagtaaacctgtatataatgtaattttttctgattccttttccactcattcctctaactcctctcaggttcactcctcaattatccaaactcttcttctttgaaagaaaacagaatccactgagtctaatttgtgctattctatctacactggcatatggcatccactagagcatagtcaacgtataagtagccatattcataaagaaaataaattctccctttccccatagctatcaactctcaatcgctcctcagctagaaattaagctcagcagctcctccactgtttttcatgtttaaatattgaccagcttgatcttgtacagatttaataaaataaacacgtttggtttgagtatattaatgcattagtcctgtatgagctcacaggacactgttttccttctttcttcctggcttctggctcttaaaaacctttctgtccctcttttgcaatgtcttctgagcattagagacaagggctgtgatatagacatcatttttatggccgagcatgctgcagatacttattctctaaacttcaactagtcatgaacttctgtactatatatcatcaactgtactaagaaccttctttgttgaatattgagagctgtcctaatctgtaactatttagatacaaatttagagggtggcttgatactttatctatgttagcaaaactgcttgaaaggcttcatccctgaggcacatgagttttgctcccataggtctttacagaacacatattacttcctactttggtatgagaagtaaatcgacatagaaaacggttgttaacacttattgccataacatgtgctttgctgctgctcttatgggcatatcttgttatgctgatcattactgtgtctcaaggagttcacacacagataagactattgatgactccctcaccccaagaagctgcataacacctccctagagtataaaagctagaattcagggagaaaactttcatgttagtgaaagattaatttctttatgtcccatttctagagagtgggctttcttcagaaatagggtctcactattgagttttgttgagcaacaaagaccaatagtaaggtattgtaatatttgggagaactccaggacacccgtggtcaacaactcaatgaagggcatctttactttaaaataaaacatctttcagagactgaaagagatggcagtgtatacaaagatctgttagaagatcaaacgcttaaggagttattcacgtgtgtgttcgtatttggtttactttcaaaggtttaataatattcttttctaatatttgtttaaaagatgaaaggccttttttctttgaggaccggctcttataacatcagaagacactatacaaattgccaggagagaagagtagtcagtaatcctaaacaattatgaagcctatgagctacaacaatgactggacttgcaaaatatgcacagtggacgctttttatcttgtgattaagcaacagctgtctaattgtacttaaagcctactcaataggagagtctctttcatgcattatcaaggaagctgctttttgcaacagattgagactatttacagagatctacaattggttaaaactacagagaataattgactttggggtacccaatacaccttaaaataaaatcccaatagctaactaaggcttggtgaaaatcaaagaagagaaaaaatttaaagtaaattttactggccagaggtagttgattttcaggctttctgcagagtaatctcaccccttcttgtttgtttgtttttgttgttgttgttgttgatttgatattttatttatttgcatttcaaatgttatcccctttcctggtttcccctctgctaatcgattatcccattgccctttactctgcttctatgagggtgctgccccaccaaactacccactcctgtctcacagccctagcatacactagggcatcaagccttcacaggaccaagggtctctccttccattgattccagataaggctgctacagctccttcagtctttcccctaactcctccattgaggtccctatgctcaatttgatggttggctgtgagcatctgcatctgtattggtcaagatctggcagagcatctcaggagacagctgtatcaggctcttgtcatcatgtacttcttggcatccacaatagtgtctgggtttggtgttggtatatggaatgggtccctaggtctctggatagctcttccttctgtcactgctccaatctttgtccctgtatttcctttagacaggagcaattctgggttaaaattttggagatgggtgggtgatcctatccctcaaccgtggtggtggggggcatgcctaacctctggcatatggtcttgacagattcaccctcccctttgcttagttctttccaatctctggctggatagttcaactcaggtgctctggccaactcctcttcaagctgactgattcaatctggtttctctcagtttctgattgaattgctctgtttggcttcagactaactctggcaatttgtcctgatcatctggcttcttcttattccctgatttcaaatgcctctgcagaccttcactgaactgcatgaactcactaaggaatgaagtcaactgcactgcactgcactcactgcactgactcccaactgactcaactccatcctcattgatgaactgctttctctctccatcaatgttcttaaatagcctttccactgaaagtttgtatcatttttcttacttattctgtcaaataattctctgatttatcactttggctacctctcaattagacatgattgtttgggattaaaggtatttactaaaggtttctagccagcggaattaaagatgtgctctaagagtgtgtttgcattccagacagatcacacagacttagttctttggatatgatcatagcatccatgttgttggattaaaatccctttacaaaagtgggaagattataaaagccagaggctgaggatgcctgcggctagaatgtgtcccctagacataacaggaaaataatatacccattaagtcttagcaaaatggttgcctgaacaagactggcatactgacaataccagttgatatgacgatggtgaaaattccttgttttctctttttaggtaaaaaccaaaaaaccacgaagcaaaactcaaacaaaaactgcaggtttgctaacacagtaagaaccagtttttcccagtgatgagatcccacatgggttcttcattcccaagggatcagctttatacacatataagcatttctaaatggactcagtatgtctgatatatacagatatatgcccctcaaacacaacctcatagacataaaaataacaattaatgaaaagatcatgaacttagcaatatattattttcaaaaattaaggtaaacctaaatgtgctaacatggaaagtaatttaatgtttttgtaattaattttttgtaataaaaatactagttgtgtccttgaaaggttaactttttattaatactaaagaacatagctctggctttccaatgactgaaataaaacagtatctttcatttctgctaattttctaggtatttagtatttatcacatgagtatgaatatttacatccttgtgtaagtctacatagttctcactctcagaactgccttagtgacctgaatttgctgctatattttctagtgtgggactcttcctgcttcctagctctttaccttaaatatgttttcaaaaaactgtaaagttattcctggattctgtgacagaaatgatgacttaattaatctcagaaaagatgaatttgccattttgattataagtacttttaaaaacttagcaatgcgagtttttttttttttttttttttttttggaccagataagatcataggcacaacattctaacttttataataataataacaccttatgagtttccatatataataatttcaccaacattaaaggttctttacctgtccagtctggtttatgtcattttagtgctttatgaaaaatatttactcatgaatttcatatcgtcaagactttctgcacagtaattaatcacttttctgtgcttggatttaacaaccttggtaaagttgtttatgatgttatattactattctgaatatactaaatcctagtctagggaggcaaaactttttcagcaaagtatattagttccttagtgctgtgataactcacaagcttagagcgttaaaacaccactagttcattacattctctgagtttggagtctgaaatctgtttcacttaagtcaaaatgtaaatgaaccttcttttatttcatttctttaggctttagggggaaatccattttctagactatagtggcattctccatttcatagcaaatggacccattctccatttccagagttgagttctgtttccatttttacattattgtctgaatctaataataaagggaatacagatcacttttatatcctaaaggacatgcagaacgggcagtcttttcttgaactgtgcatagatattgattttcaggtcccaggagatggggaccggaggtccatgaggattcaagatctgtcttctaaagaccagagggtgaaccattttaggacttgcacgtcagagtgtttctgtgaacattctttaacttggcaataaacagtttataagtattggatatgggtgtactacaataaaaatacattttaaaattgttgaaaattgtttttaatattcagcctataggttatatactaacaaccttttgcccctactaaatatatgacagctgttggggaattcaaacaatagtgtttagaatgaattagtgcttgtgagaattaatgaagttagagcaagggtctagagaaagtccctgcagatttttcgattcatttgtttgtttgtttgttcgtttgtttgttttgatattctagtgagaaacttctgagatacaacaattttctttattttagtcttttgtcctgacattggactttaatataggattaaccattatgctgaaatgtttcataattcttcagaacttatataggcatattcatgcatatgacaccttaaacgaccacaagcttcttctagtcagttgctgtaaggcgagttatacaagataacaataggaagaaattatggaattataattgacaaatttgctatcccttcacctccaaactttaaaagttaaagagcatcaacaccatgtcagaagtgtttgtagccatctttgtctcctcaaaagaaaacagaagcccagtgtttcaggggaagccgagtgagtgtcatcagcactcatcattctttgatccttgtcatgtgaatagattcatgatctgacatttgctattctagtcacaatggctcttgtctcagcaattcaatttcagtgtctcatgaatttaatacctgctctattatctgaagatttgtactaacttttacagctgaacattttccaaatttcctgttcatcctaacctttccacccctccatctgggtgggggtggggtgggggggctttgtgaaaaggcaagcctattcaacaaacttccaactagtaccatgcgtgtaagagcaaaaaatgtgactagacaccagatctgatatgtgtcagacattgacagcttcagttattcaatagagatggggaaataggcatcaataaaaaaagccatgggtacaatctcagcctcctcagaaactacctcagtgagaaaggttattatatgccctttcctccaatcatggatgacagaagtgtcctctaagggctaaaagcaaatttatcatttctttcaaaatctgagcttccttgggttaagattaactgcaagtcttagagtgtaacttgagaagcatttaatctttcaaaaaagtgtaggcaactaagacttaccttttctcactgatacacattctctcacatggatggtcaacatttttagcatcactccatgttaagtatatcttaattgggcagatttgaagactatgaagcttaatttccagaaaagcttaggcagagtgaatcttttcatgtatttggagtttgaattgtgttatcgatcacatagattcccccaagaattacaccttaagtactaaagaatatccatggaaacttaaactagacttcgcttacttcactgttgctatagctggagaatactttcaaaaaatttaagaaactaggatatttctataaaagcaggacttataagataaacatattaaacaatttcttaaagaaaataaagccatcattgtcatatttcatttttttagtttgattctggatcagtatttaaataacttagttggggtttagaatattttaaaaaaaattctccatagcaaggttaggtgatttctatctataatcacaacacttaagaggttaaggcaggaggattggtaggaattcacagctaccctgagctaaacaatgagacaatgtctcaaaatataaataccccacactttctaacacaatttaaaatcactttcaccaaatactataacccagaaactcacaagtcccacagaaagtagaaaaattattctcttcttgcctcttgcctttcttctaatataccttttccttccatcttccctcccttcctccctctccttaaaatttctcatcatatattttttttgagcctttagatgtgttctttctataatttcacttaacatgcattcaaatgtggtaatttctgctagctgccaactacatggaatcattcaaagtggcaactgtatagaatgataatgatttaaatgttttcttctcctctctactgtgttaagtaaagcatcttctcttacatttcatttatgttttcagaatggcagaaagtataattattcttgaaatctgagttttgttatctgtccacataggaacttagtcctgtgtaagaaacaattgatattatttactgttttctcttcttctcctccaattatgtttcatgtgacaattctgaaaactctactttttacttgtaaaataaagtgtctttccttgcctattatctccttggaacaatttggaatcatgttgtgctctcttgtacatatcatatttcacacacacacacacacacacacacacacacacacacacacacaccaaacacaaaataaaatgaaaaacatctataatatattatacatctgccattggctgctctgggctaacttgttcttgcttaattgtctaccatgccactaacttaggtgatactgatatacagttagtccttctctgtatttgattgaatagttctcccttttactaaggtattactctcccttgagtcctgtcatgtgaagagactcattcaggaaggaggttaaaaacaagaaaaagtacaaggcaaataaaatatgggaaatcaaaactccttccagtgcttaaaaatacacaatactgtagaaataattttattgtcaattctggcatgcatgctcaaacataagaaaagttaaaaccagtatattgttttatccattgcattaacatttaagatattaaatgcacttaatgaaggccattgtatttgaagtgcagtttatagtaaacattaaggcaaaatttgttttcctcttttattctagactggacaactggcttaggtagactggcacctaggggaaactatctccaagctacagacacatggaacgtttggaaatacattaaattctctgggaagttttgtacaaattgcctctctatttatacctctaaattgtgtattcccatgaactaaaaatgaaaacactatgcagagttgtgtacgtttaccaaggctgcactaatagcaacaggtcactttgtgtgcaattgagactttgaattgctgacagagacaacttaagagtgaaatgataaatgttgactgtttcaaatatttcagtgtatagcagtctggatccattgttattgattctgagagacaacagagcttgtgaaatagcaaaacatattacctcaggaatcacagagaataaaacaatccacaggggatgagcgtaagatatagaccctagactatgttcccaggggcttacttccttgagccaattctttctaatagtgacaaataattacaacttcacagatgaaattaatctactaatgaagaagaactcacacaactcattcgctcctttacttcagcactaggttttcatcacttgtacccttaaggggatattgcatatccaaattataacgtgcgttcagggagattctaattttgattatataatttactcaaaaaggttgtgaaaatattggtgcttactcaccacatacatcagtgtaagttcaccttaaatgcttctacttaaaatgtaaatgtgtattttaagcatttttttccttgaaataatatatatttctttcctcatataatatatcctgattacagtttcctctacttaactcttctcaatttcaccctatctccacttccatctggattccctcatttcctgtctgtagaggaaaaaagaaaaggcttgtaagggataatgataataataaataacaaaataaggtatactatggtaaaacaaaaactatcatactagatttggacaataaaaagagggtacccagggagtgttgggtatgagttcaatctcatggagtgggccttaatgcaaatcaaatattttttggttactcccacaaactctgtatcatccttgtcatagcatatcttgcaggcctggcactctcatagttagggttttactgctgtgaacagacaccatgaccaaggcaacacttataaggacaacattttgttgggcctggtctactgtttcagtccattatcatcaaggtgggagcatgacagagtccgggcaggcatggtacaggaggagctgagagttctacatctgttatgaaggcaaacagaagactggcttccaggaagcaaggatacggtcttaaattacacaatggcatacttccttcaactaggtcacaccaactccaacaaggccacacctattagtaatgccacttactggaacaagcatattcaaaccgttccagatatcactgttgatcaaagggtttatggctgacttgtttttatgtttctcctttggcagtgtgtagagttgatttcttttttttttttgttttgttttgttttttttttttttaattttttttccattttattaggcatttagctcatttacatttccaatgctataccaaaagtcccccatacaccccccactcccctacccacccactcccccttttnnnnnnnnnnnnnnnnnnnnnnnnnnnnnnnnnnnnnnnnnnnnnnnnnnnnnnnnnnnnnnnnnnnnnnnnnnnnnnnnnnnnnnnnnnnnnnnnnnnnnnnnnnnnnnntgggtgggtaggggagtgggtatgggggacttttgggatagcattagaaatgtaaatgaagaaaatacctaacaaacaaacaaacaaacaaagaaaaagaatgtaggggtaaagtgtctatgtagacactaactcattttctctatgtttaaggaataatttaagtgtactcttcatcaattgggctctgttgtcagtttttagagagaatcccatgtgtcttggcaacagcctgagttgtttgtggtttcccatgagaccccatttgtcagcaattcaattagacctaatacagtcctggtactgcaagctgtattggtggtaagggatggccagtttggactctgcctaccccatcatttgatgatttcatttagatcaccttcatatatgtatatattttaggaaggatctactgtattagctttccatactacccctcaaatggtccttaattatacctgtgtctccccatactctctcctttgctctccctcttcttccccatttgatccttccattccagtggcccctattcacccataaggacctattctaaattcattccctaatgaaatgcatctgtgctttctaatctcttactctgtgtctatcctcttgtgactatatgaattgtagcttgcttatcattaaattaatagcttacaccccaaattatgttaatgcataccacatttttctttctgggtctggtatgggatgatttctttttttttttttcttttttttttttttgtaattccattatttacctgcaagtttcattatgccattttctaaatggatacatgctcctctattgtgtaaatatgccacattgtcttcatctattcttctgttaaaggacatctaggtttctgccaactgctggatattatgaatagagcagtaatgaatatggttgagtgagtgtacctctataagcatcccttgggagtatgcccaagagtagtatagttggatcttgagataaaacaattctcaacttccgggagaaccaccacactaactttgatgtgcatcaaagctgagaactgctgctcttggactctcctgaatagtagacctaatcagtctcaaccgagctcatattagcagtcagtaaggaggtaacacctcaccacaaatggtgctacctgattatctttgccatgagtatgaactagcccaacagacaaaggtcaactgggtgaagtcattggctctctttgtaaacaatgtgactttcattctctttatgtgttttgcatggcatactcttctgtctccaactaatgcatgaattcttcaaattaatctaaaaactaagattttagcacatcaaattttaagaatttggctaaatgcttttaaaagagcagaggttacattttgtttaattccttagtttctgttgtcatgcatacattcgaactattttttgagtgatataatatgtccatttaactatttcttttactacagtgataaaaatcctcaggcaaatgggttattaatttaataaatgggaagtacacattaattatcatttgttatttttcacttagttcatttgatgcacatatttgtagggtaatattaaaaatataagaatatgacttcaaagtagtagtttctctaataaatcagtgggcatcttttacattactaacttttatgtagactaaatgatgtagcaaatactcttctggactgttatacaaactcatttactatttctcacacacttgtgtaagataagttttatttcatataacaattagggaaattggagacaataaagaagctggttaaattggcaaggccttggtttgacattgaccttagtttacttggcagctataataaaaatgccactaattgaactttgtaataatagtacacacatttatttcacacaattctggagactgaagtacttggcaacatctgtatttagagaagatttttgtcactatttttgccagatgtttgttccctataacctccatgtgttttatgtaatagtagtggttttgagatgcagtttttttttttttttatcagcacaaaacctgttctggtggctctatcctctggacttcatcattcttaaatatcccaggttcttttaccataactatgtggttagaatttcaacagaaaatttgtagaatatatatttgtaagattaaagaggctgcttaatggttaaaatgggtcaggcattgtagttacaccagaaagtctaatacttaagaagtggaataagaaagtcaggaggtcatcgtcattcagggttcatgttcaagtccagtctggactatatcagaccttgtttcaaaccatgaacaaatgaaagagaaaataagccctgaccccttgaaatagggcagtgagtataaaatctgacttagtaacctacagtacatattttacaacattctttttcattaaacatatttggaaattaatttagtgattgtagaaggactcttgtacatggtatcatcccagtttgctactttttcagatgagaagacaggatttaaagtaagatcagaaattgatcagagaacaaagataatcattgtgaaacataaaaatatagagtgaaaggaaaagcagaaggggaagaggattgatacagagataggctacaatagaggtgacctgaggtctcccgataacatgaatttggatgagtttggatgctaccacagatgtccataaaaatgtagaggatgatccagggctatttccggtgagaaaatagcctgctgcctccttcagctgacatgcaaatagcactttctgtttctaaagacttcttccagcactcagaaaataattctatctccactaattgcttcaagaacattaacaacaacaacaaaaagcaaatgtatatggcagggtttaatcaacaatacttggcaaaaatgtcctgtgtctaagtagtatagggaaatgtggaatctctacagttcctcctgggatggagacagttttgtgtgtggccagaatttttatattgctactcagaattgttttttgtaaagctccctgtctatttctaggattaaatataatacatacacacacacatatatgtgtgtatatatatatatacatatgcacatatattatatacacatgcatatattacctatgtgtatgtgtgtatacacacacacacacacacacacacacacacacacacatatatatattagataataccaagttgtttggcaaatagccatatctaatgaaattcttttcctacctcagtcataaaacaagatgtatatgtgtatgtgtatgtgtgtgtgtgtgtgtgtgtgtgtatatatatatatatatatatatatatatattaattttcagttttaattaccttacaaagtggcagatttcctaatgggattttcacacatatttatatatttggttgactctcatcacacttattccccttccctacatcttcctctctccacttccaggtaaacagaacacaattttccatgagtgtgaagggattgtttttaaaagtataacattcagataatggacaaactggtacactagtgaatggagagtataatcctggaagaaacagattaaaacctaaggtggcttatgattagagcatagatgttgtaatctagaaaaaaatataagttgaggattgtaatgatttatttttggtaaatacatatggatttttataaaaggatctgtgacataatattatatttttctcatttctatttattccaatttccttgtttttcctcactaaaactccacaagactggtgcagaaaggcaatgttccctcttatacacatttagaatttgtgtcaatttgtagactatctcatctaaggatccgtgataagtacacagccaattttgttattaaataatgtccagaatactacacacagatttccaggagttactttatttatttgtttatttattcattcatttattcattcattcattcattcattcattcattcattcatttatttatttgcagtaaatgttctccagtaaattgcaatgctcattcctaatacagagacacctaggcagaatgttgactgatagtttctaagaattctatcttaaaagactctggacaaaatgttagtcagcaaataactacaggaaccaattttagtgtccagaaatgaaaagaatttagagggctgtggccagtgctgaattttcatacagcgtcagctctagtcatttgttcttgacacccacattaacaggtcatgctcacatagctcactctccacctttttgttcaagattccgagaggcctgactttcccatctgaaagctggctctctgtaagaggaatgtatgaaattataatagaatcccaaaaagcctgttgtcttcataagacctttgacaatataacttcaaaccgtaatttggagaagacagaatctttcaagccatggatgagagatctgtacaatcctctcaggaatgctgatttaactacaccaagcccattgtcatctgcatgtggaatgtgttcatcaaggtctcataagtggagtcacaataaaatagtatgtcttgagattctgtcccgagattctgagccctccactgaactaggaatggatgtgtggaatgtacaaattaaaactgaatctttgttaaattacaatgatattgttttttatttaataagtcacttaatgaagtatgattgccaaagtgctaatgagtctgagaatgtccttgaacttctgaccttcctgcctctgagtgctaggcttagaaggatgtgtttctacaccaagaatttttattactagtaatattattcaggattcttacatacttatgaagccctctaccaacgaagttacagttatattcagtgtcaagttttaagtattttgtttaatttttcattctagtttttcacaattatttataatatgcaaatctccatgtgtgagtttctccattttcaaaaattcaatctcagttctattttttgtctactgagtaattttgaaatccataaattcatattaatgtttaacaatgatgtaacataaattaatacttcatggtgacacagcttctgatatgattttactattatttggttttcataaatttcatgtagcctttattatagataacagatcagttaaacttctcagtttttagtgttgagagcaccatggaattgaaataacaataaagatggagcaataagacgttataaataggcctgtggccccagtgcaccccaagtccaatctccagggtcaagctatgatttgttttccaaaaagacaaagaagaccatagtgatacttaaaacagagttggcaatggtgaggcatctcaaatggatcccagtaggggaattctagagctcttctgactgcattctaggaccctatttattctatttactattgagtaacaaggctttgaatttagagtggttgaattatttaagctattttgattaggttaagggaatgtttttcatactttttatgttcttaatttaatctgaaatttaaaaactaatgtcatagtagttacatgtttgcaatacatagaaacttagtcctggacctgctgaaatgaaacccttccccaccccacccccagttcttatggataaaagaggcagatgttgacttctgtggccagactccatgtttgatcctcaaacacagggattctaaaatacaatagtaatgcaacacaatcaaactgtctaaggcctttgtctatattcatttcctgaaatggtgtaacaaaattaattgtaatgagtgacatctaggtcatacctggtatcataacattattttatttcataatacatgaagcagcctgacagaggaaaggaaatgaaagaaaaccttgttttctacatgttcaagatgaaaactttacctttatttccatattgtatagttggtggccaatggatagtatgaagaatatactttttttgtaaagctgttaaaagtaaacataaataaataaataaataaataaataaataaatagactgctgtggtaaatctcctcccaaatatgccccagcaatgaaaacatgacataattaatatgaatacatgctatgtgcctagatagggcagatctactgctacactaccatcttccacctctatgagaccccttagatcttgtggtttctccaggccatgtgctttggctctgctttacttcttcctccttctctccactctatctctctaacctccttcttttcttgacttttcactccaccttctctccctctgcccaatcatcagctctcctttattttacaaagatgggaagaaggtttacaagaaatcacctgagtgctgagttgttccttgttcacaacccctcacaggagaatggaattggcatcaaatataattagcccaagggctatccacagcactttctcctttctgtccaattaaaaaactattttatctcagacattattgaacataactattactattttgtaacttataaagtacaagaggcctaacacccagtccatcatctttgttaattaaacagaacatctgtcatctctccttacttaaaagacttacaattctacatctgggtatgtcttagctttagatagaatgctcttagaaaacaattctctcaaaattgttcctctcaaagcaaaaagcctgggtcacctaggagacgatctagtttttgaaccctatcagaaatctaagaatgactgatattaacttaatatatataggaaacctaacacagcttccaaaacttagccaatttatagagacgggtgatcacttggacagtcccttacttcaacatgttggaacatcggtcttcagcctactgaagtctgtcagggtcatctgacagacttagagaaacaggaatattaagtactagtctactctgtcttggcagaatcaagctgttctaaactgcaattgtgtccccttggacagtcttatgtctgtagatgaaatgaggcaattcttgcctagtgactgttttgccacaactggagtaactcacagatgctcaggttcttctttgaatccaagacagggaaagctgtcaggagcagactagtctcaacaagtgaataaatagcattaaaagtcacatactgtggacttctgacatttttgaaaaccaactatctatctaaagtaatctagactggtctctgttacctactcttggccatttctgaataaaataactgaaaacactctaacaataaactttaagtcatgaatttcctatttgacccttaactcacgggcttaaacatctcagatctgtttataataacagcaatagaaggactgggtctaagccttgtacttcaaaatttttagtatcaaagacaatctataaaaccactcccagcgccaaagcctagggaactaggatgaagacgcttcataacttcttcaagctgaatatgggcattgagatatttctgaagacaggggaaaggtagggaatatggggaaatccattggccttaagaagactacaccaacagagaaacctacatggtgcatttctctgatattatatgtatagagacaattttttctcatataacaaatgctacctgtatttgcatagatctctgagttctcgctaatgctctcaatcattttggtcatagacatgtattacttagcatgttttctgttgtatgactgactgagaagttgaaggacatgctgctggcataaagccatagatatctccttgttcccttacttcaaagaatatataaggaaagacaaagcaaacatgatatctggaaccattgtcttacaaagtgagtagtgctatgatagtggcccgagacttgtgattttatcaatattaattacaactggagactcacctctgaatgctattaaaatataatgtacaggtatacattttcgatccacaaacttttaggagacatatgtagactgaaaaaattagcacagagttttcccgtggagaaataaaataagatagaaaacaaaagtatatttacattattaaaattgctattgtagagttagcttcaactctacctttaaaacataaatgaatggtatagtactgaaaataagaaggatgcttagagcacgcaactctgcagctacatctatagctgcaaccctggtaagatttcttgtcattcttcttctttgcttgttatgacatttcaagatgtagtaggaagataaagtccttgtggcttagtggatgctttattcctgtctaatggataactgcgaagtatgcacatatgcacagtactcacaggtttgaatatagcaatcctggacatagatgaagcatttcttaggatgatataatgaggagaacaggcctaccaaatcacatgcaaattttcattctaaatagatggaaaaaaatcatcagattgggaatactctgaagttcagagaaagcaggaatttctgtccatttagaggggtcataatagcctatgttgacaagatgggttctttctctttctctctttctctttcctccttccaccaactgcttcttccatcacctctcaactcctcctgttgctgcttgctgttactaatattactaccactactactactactactactaacactaccaccaccactactactactatttagaggctttttttgttgttgttgttgttgctgttcatctattttctttattttcctttttcttcctctctctcttttttcgtccatctattttctaaatgtctgtcaaagcttttagaaaatcctcatctaatgatagattataacagtacaactgcaaagttggtggcctctgggatatgtagaccaagcaattttttttctagccccctatccacatgccttcttactttactttctggaaagtttatggtttggacaagattcctctcaggggagcttttaattgagctgtatcatgaaaattatgtttcaaatctcaatgtaaaacaaaaataatcagatttttatagaaagggacatttcaaagcaattttattttataaagatctttaattactacctttgtaaatggcttagcactggcatatgccgagatttgttgacctttcagtaaagaggccgatttttgctccatcagatggtagaatggtttaatggaaaaacctacacaggatacatcttgttttttttttttttctctcggtttctgtctctttgtgtttttgtgtatgtctctgttatgtgtggatgtatgtgtcatgtgtgtatggcatgtatgtgtgtctgtgtgttatgtgtgtgtttgaacatgcatatggatacatatattttgaaggtagaaactccctctgaaaatattttccctggaaagagtcgcatgacctgtgaacattggtctttgatagcttaaaattttgttccacagatgctcttctgatgacctagctgtctatttaaactacttagacactcagatagttttcaactatttcttaaagatatatttattctgttgtatgtgtattaatcttctgcctgcatatatgcttgtataaaaatcttgtgttcgatgcccacagaggtcagaataggaattcaaacacactagaactagagatatggatagttggatgccacagtgtcggttctgggaattaaaccaaagtcctctgcaagagcagtaagtaatttaatccaccaaatcatctcttttgtcctgatatcaataattcttaaaaataaaaataacaatgttcatcatataagctatcttgaactatatgtggatttggcataaaaatgaaaccaacaataatacaaatgaaaatataataaaagtgatattttatagatatgaattatttaaagatgtacactgattttgaactaattattattatatagattttatagttcagaatattctgttctgaaagggtaatttctcctgccttattgaatcactattctaaggtcatctttctagagaaagaaagagctcaaacaccttgctctaacaatcactaaatatattacaagtgagacttcttattattccatcatattagatagcaactaatccttttataaaaccaaattttaaatcagggaccaataacatgctcagtgcataaaagcatcagtctcacatggtatgtgcctctctaccctcacaagataaatacaataaaatcacttttttaaaaaaaatcaaattagcacttttttgtttacctctcagtatgatgtgtttctatgaattcccttgtgacacgacttgtaaacatcaatggcttaggtcataattctctggagatttatgatttaatttcaagtatttatattacaacatagtatgttttctgtacccatagacaaggagaaggatgtgcatacagtttatatagataatatcatctgtagaaacacatacaggtatcctgatttttctcaagccctacttttaaagtttgcattatgaggttgcatctaaaagtataggttagttatttcccttttctatggactgccccttccttccatactaatttagtaagtatatcatgaagttcataacacatacgatttcaacattgaactatttgccttattccagacaatatgacaatgttgtatctgtttcttcatctgggaaacattttggaaaaacagctctttgtgtgtttgtgtgtagctttttatttgagagcttagccaaaataacacaaaacaattcaccatcaaagtttctggaaaaaaaatcaatgaacagtttacctccctgtctttgctctctgaattttattgtatatcaaaattgccttatttctatgaaaaatggggatgcattatttccattactttcactatcttgcaggtaatatttcaagttgcatggaggatattggatactcagagcttacctggcctcatcctttactgatttatgcatttattcatctttaattttatatagtcttcaagaagaatggggcatatctatatgtactgacatgagggaatgttcaggaatcatattaacttggaaaagaagattgctagtgtttttctttcacaaaacacaaaataaaacaattccacttacatttgtgtatgtgtagattaattagaaggatctgtactaagctattggcagtgattacctggggtaagaaaaattacatcactatatgagcagagaggacaatatgagtaaatctgttgtgtatgatattttttgtgttcagtttttccctaaaatgaaatcactggttattagaaataagcacgctgtagcatctttctaattacaaaatacaggcctgtatagagaccctctcacacttccctacgtgaacccagctaactctctattgagcctctcatctttgatacatattgtagccctatgcatcactcttaactctgagctcaaagtgctatgtgagatttcacagcattagctcatgactgccatgagcttgcctaacttgcctactttatgactgtcaatcgtcggtcaaagctgcagacctttggaaacactgggcccacctgtaaaacttaccattcccatggtggcatgcaagaaagtgagccatctgtactagagaacataactgacagacagtcccactcactgtttttcctatctattgtagaatttgctgtttgaatgttttccagaggctgcttacagccaaggccttgtatcagctcagatccgttcctatgactctcagaatggctctatgtggaacctcacacatgaactccccaccagctctctgaatcattcttggaattacagataaaggcatgcttttccgtcatgaatttttccaccctagcattggcctttagttttttcaagtatctcatcctttcagtagcttctgaagcctcttctttccttgacctgctcactagaagtttgtctttataatttttttccagcacaatccttatatatcttttgagattgttatttggttcctaattcagctataaagatgcctttatgccatacatacaaatatatccatatatgaaaagttgtcacatccaatattttcttatatcaatcttctagtttaaaacatagacttagaaaaatattatgttaatgcttttgtgtttagcatttggttcagtttggtacttagtgggttttataatgaattttgaatacatgaaaactaaaagtataatcttatctagtatgaatacattcaggtcaaaatgagacaatctgcccacttttcaggaagtgctaccagtctatttgaagacatctatgtgtcagcttaataccacaagcgagctccaagctatgttctaagacactgttgttgagcttccccatgcccaaaatattttactgagttcaagtgagttttcacgctcatgatcttaatttatccaaactttaaaagcctaaaatatcactgaatctctctcattactaaaagaaacagccttgattaatcactttaagcatttcaaaataatctaccagttaacctatatttaacataagcatgtgtaaaatttatatgtgactattcattgggagaatagtatattcttggagagcactaaaatcaagttgcatttcttaatccttcaaagaagtaataagatttagaatgttcctttttattactatgcagttgtaaactgtttttcagatagatatagatggatagagatatcgagataaattattataattactattgtgttattcaattctaatcttatattgtaatgaaggaaataaatataagaatgctttctctgttaccattaaagctagtacaccatagactgttttttttaaaaacaaatattctactcacctctctacatttactttgttagatgcacgttaatctggaaggtagttgctcacaattcagttgtcttgagcttggaaccatctgggaatgctgaaaaagtctgttttctcagcaaagcttagaacgtttttctaataatccttgtagttttgctttgaatgcaagttcgagtcactcaaattttaaggcagcagaaagaggtacatgagtttgaaaaatcatgtcagaagttggcactatggaaaatgtacatggtgataggtaagactatcaaagagaaacatctaggagacatgttctgaaggctctgtaggatatgactacagcctggagttgtaggcaaggcaagggcaagaagtctcaagtggaattttaagttcaacatttcataagtgtgggcctttgataaaggacacagcctcacatataaatttcttcctgtgtaaaggaaaaatctgcttcaaggagtgggagttttaattaataatacactctagtaggcactatgtttttttttatcagctttttgcagaatcatttgacttgtatccaataacagactcaatacttacatatgatcacactcagttttacgactagaaaaattaaggcaccatgaagtgaagtaaaaaacaaaacgtggttctgtgctatctgaaaattattgacagtccaggacgaaatatacacttgatataaagtagggaatttctaaatgactataaacaacctcaaaaataatgttcttgagagatggtaccaactctctcatttttgtgccaggatattctgatgaaattttgtactatgaatgataccaactgattggatgctcacagacctggcacaggtgtatttcttggagatggccattcagtggtaaagtaagaagcctctagctccatgataatttccctctgctaaaatagatagcgcactgacaagatgcatgaatggaatgaactgaattggcagtgtttgtaagtcatgcttggtaaatttatttttagaattatttactcagaaatatcacacaggaacagagatctgtagtctttccttgcttccttgtcttttcagagagaactaaaaaagcaacctggctttattgaactctaaagtatcaggtgcagctaacgacagactgtctttttttctctctctatttttggtcattttttctctactactaatttagagtcctaattatagtgatgcattaatatgtgaaaatggatgagtctgtgaataattaaaaacatccacttgtttttatgctattcatccataaatgtaaattcatttctgaaggaaaaaaagtgaatattgaagagtgaatttcaaacagacatatgtgccagggttttagttgcatgaaaaggaagtaatgatttgaaagtgattcttggtagttatttataacaattgggaatagatatttttattggtgcttacttacctaagcaccaatactaaagaaaagttttgaatttcagaagtgttattttaacaactatttataaaattgaacctcatttatgattcatatcattttttaaagagcattaatgttcaatgcaatatcatcattcagtttataacataacattatgtatcatgaaacctcttttcttatgctcatagctaaactttttacataggcacacaaagcatatatacaatcatcaaatatgctgtctttgaactttgctttttagaatttttctataactcttcacgaataagcaaatgtcattttcacacttgatgataatttgttgaattgccccagtcctgtatggccacctaacctttccatttcaatagagttatatgtaattttgctagttccttgttgttaagtcagagcatgcatttgcaaaatagcctcattacactggagtattttataatctgagaagtcgaaatgcatacatttaaataattctgcctgttaagttacaaagatgtaggaactagggaagtcatgagaatcagagatacttagtgagaataatggtgtatttcaggtagacactttagagctgtgattgcagtcttgtcatctgagaacaagtacataattcccttttgtctttgtatcaatctgtctcatctctacatgtttagctgttctatgtttatttacctaaaaaagaaaacatctttgttttccaaactaaccactgacatttccaaactaatctagacaacacagaagcatgatgaatcatacagtatgctttccaataattaatccctggacatgtctgtatcaggcacatgctatccactactgtgatcataaaagtaagggaggtggtatataatcaaatctctataatgacagcactctaaaacacttctcagtttgttgtcaggcaaagtgaaatacctgaggattctatcattctgcattcagacctcttccgtgtgacagtttagaattgttatggggcctgcactcaagtggagaaaggtcaggggaagattaggttttcttcctgccaacctggttgtatatcatgaggaaacaaactgtcacaattggaggaagacacaatcctattcatttttctttatcggatttttccaatgtactatggcaactaagagaacattctcaagtgatccttttaaagtgacaacagacaaagaatgctcagattgcatcgatccttgtcattagtattttattatagtgaattactgcagtcactctccaacattccaaggtctcagttcacaaaagtgattacaaacaagatgagttactggggagagtcagggctctagaactattatttataataaagaagccaacattgcaaagatcttaccagggttttagagaatttgtttggatgccattgttaggcttctaaatattctggtaattttctatgagatatgacatgtttggttttgttttttttttgaatgcttattgatggcaaatgatatatatctgttgaattaatatttgcttttgtaatacagagctatttagcatagtatatgttaatcccactgatgaaagcagaaagactactgacccaaatcatggccaaattaattatagcaagcttttttaaaaattttttattaggtattttcctcatttacatttccaatgctatcccaaaagtcccccataccctaccccccactcccctacacacccactgtgacttcttggccctggcgttcccctgtactgaggcaaataaagtgtgcatgaccaatgggcttctctttccactgatggccgactaggctgtcttctgctacatatgtagctagagacacaagctccaggggacactggttagttcatattgttgttccacctatagggttgcagatccctttagctccttggatactttctctagctcctccgttggggccctgtgatccatccaatagctgactgtgagcatccacttctgtgtttgctaggccccagcatagtctcacaagagacagctatatcagggtcctttcagcaaaatcttgctagtgtatgcaatggtgtgtgcatttgggggctaattatgggatggatccctggatatggtagtctctagatggtccatccttttgtctcagcacctcatggtaccttctccaaaattgaccatataattggtcacaaaacaggcctcaacagatacaaaattattgaaattgtcccatgcatcctatcagatcaccatggactaaggctaatcttcaataacaacataaataatagaaagccaacattcacgtggaaactgagcaacactcttctcaatgataccttggtcaaggaaggaataaagaaagaaattaaagactttttagagtttaatgaaaatgaagccacaacatacccaaacttatgggacacaatgaaaacatttctaagacggaaactcatagctctgagtgcctccaaaaagaaactagagagagcacacactagcagcttgacaacacccctaaaagctctagaacaaaaggaagcaaattcacccaagaggagtagatagcagcaaataatcaaactcaggggcgaaatcaaccaagtggaaacaagaagaactattcaaagaatcaaccaaatgaggaactggttctttgagaaaatcaacaagatagataaacacttagccagacttaccagagggcacagggacagcatcctaattaacaaaatcagaaatgaaaagggagatataacaacagatcctgaagaaattcaaaacaccatcagatccttctacaaaaggctacagtcaacaaaactggaaaacctggatgaaatggacaaatttctagacagataccaggtaccaaagttaaaccaggattaagttaatgatctaaacagtcccatgtgccctaaagaaatagaagcagtcattaatagtcttccaaccaaaaaaagcccaggagtagatgagttccgagttttatcaaaccttcaaagaagatctaattccagttctgcacaaaatattccacaaaacagaagcaggaggtactctacccaatttattctatgaagccacaattactctgatacctaaaccacagaaagatccaacaaagatagagaacttcagaccaatttcccttatgaatatcaattcaaaaatactcaataaaattctcgctaaccgaatagcaagcttttttattcttctataggaatttctctcccaaagtcagggtgtaagagatcatcactggacataggggaaataaaggcttttatagatcaggagtagggcaaacaggtgatttggcaggcaaataagcagaacataagcatagcaagttggtcataataacctctggggaaaatgcagagttacaaggtggttatagaaaggtagctattgcaaggtggacataacagcttttgaaacaaaggcatggtatctcctgaaaaaaggcagtacagaaacacttatagttaaagttactggtaggcaaatggatggacctggagggcatcatccttagggaggtaacccaatcacaaaggaattcgcacaatatatactcactgataagtggatattagcccagaaacttaggatacccaagatataagatacaatttgctaaacacatgaaattcaagaagaacgaagaccaaagtgtggacactttgccccttcttagaaatggaacaaaacacccatggaaggagttacagagacaaaatttggagctgtgacgaaaggatggaccatctagtgattgccatatgcagggatccatcccataatcagcttccaaatgctgacaccattgcatacactagcaagaatttgctgaaaggacccagatatagctgtctcttgtgagactatgccagggcctagcaaacacagaagtggatgatcacagtcagctactggatggatcacacggcccccaatggaggagctagagaaattacccaaggagctaaagggaactgcaaccctataggtggaacaacaatatgaactagccagtaccccggagctcttgtctctagctgcatatgtatcaaaagatggcctagtcggccatcactgcaaagaaaggcccattggacttgcaagctttatatgccccagtacaggggaaccccagggccaaaaagggggagtgggtgggtaggggattgggggggtgggtatgggggaattttgggatagcattgaaaatgtaaacgaggaaaatacctaataaaaaataaattaaaaaaataaaattaaaaaaaaagaatgaaaatattgccagaattaaatcatgtcaattcaacctcatttatgttattatattaacaagattatagcacattttctagcctccaccagtggtaaaaatgcttaggtatcatagtgcatagtctttttgtattaactggtcctcaaaggtataaataaaatcagtctaaaagtttaataaaaatgttccttaaaatcaaaaaaaaaagttactggtaggatatagctaaatctttctgaaacattttaaattcataaatagatgtgaatccaaataggaatgaatatagtttgtttttactataatatgggtttgaagcccaagatagagaaagggtggtttatcacatactcattccactgttcactttttgtggacatgttaattattctctcagttccttgtcttccaggtttagatggagataatgattcctaattccattggaatatttaagaactaggtattgatacatggaatgagctaagagttcaatctaatcaataactatttaaattattacataatatgtcatcttgttaattttattaatagactacatcctgtgattttatatatggcaatatatgtcatctattttacatgttaatgttgcttatcatattgaaaagtagatacttaatcatagtctgaaagccaatatttaatattacatgccccactaatgttacaagtttatgtgagatgtctaaaaatgttttaaagctaagctttcatccttctgtgtacagggtatacttttatcaagaatgaggtttttcatatctgagctatatattcaatttgttctgtttcatttagaggatttttagtattcaagtcctattttatagtgtgactccactttattggctcaggtcccataaaaatgacagataatatgtcactgtaatcattacagttctgtggctaaggatctataatataactcagaaggatgtctgtatgtaaaacatggcaggtctgtgccctgaaatctattctcttggaaaaagaacgtattattcagtgatttggagatacaattctcacaatgacattttcccccctccagttggtcagtctttctctgtctcaggcatatggggctagggatagtctattatgtgacaacagaaacagatattaataaaggagaaggaccttacacagttgacatcaaaggagctgtaatacctggtgcactatcacttatcagttacttagtattctaatgactttcttcatcaaattagtttagttaattctcaaccacatgagagggataattcaagtcactggagactggagacatggaaggtaaaaacaaaaacaaaaaattaacagaattttatcccccttccagtgtaccctctgactattccccatcccataatcctccctgcctccctgtttccatgaggatgtccccactccccaccccctacccctcaacccactggacctttaatctccctggggccccagtatcttgagggttaggtgtatcttctctgactgaacctagacccagatgtcctctgctatatgtatgagaaatcttggaggtccagattaattgagactgttggtcttcctactgagtcgccttccttctcagcttttttcagccgtccataattcaatcacaggggtcagcagcttctgtccattggtggagtgcaaatatctgcatctgcatctgcctctttcagttgcttgggtctttcagatggcagtcacattagatctctgtttgtgagtgctcttcagcctctgggttcacaatgtgattcactgtccaattccatataacaagaaaggaaagagaaaccttggaagtgactgaaaatagaacctgcctggagaagaaaagttgagagaacagagtcctagatacaagtgaaaactgtttagttaggaactgtttacaattcctgctatgcaaatctatcactattaactaaatggctgatttgctgtatttagttcctacaattttaagagttgtattattaccatgatggtttacaatataaataatgaaataattcttttcctactctatcttaacactcaaacagcacaacactacttacctaatttccacctattgcccacatattttcatgagcaatatctgtctaaataaaaaagatatttgtggaaatgtagatgagattgatattaatttttatagacagcttcaggaacggaagaaggaagggaggaatggtgggaaggagacagagtttgatttattgtaattgggaatatgaaaaagaatgggatttcagaccaaagagcagaacaagcagcatgaggaatgacaagtgagccttgtttaagactgatgaatggcagacaggtgctagttgtcttttgagacacttcacccagcaggtgactcagacagatgcagacacccccagccaaacagtggatggactcttatggaagaaccagaggaaagatcgagggcctgaaggaggttggaactacagaggaagaccaacagttaactaatttggactcttgaggactctgagacctcaaccacaaaccaaagatcatatactcagggctccctatgcagatgtagcagatgtgaagcttggtcttcatgtcactcctaaagaactggaatgggggttattccaaaagttgttgcctacacatggtatatgttcctctatctgggcagtcttgtctatcttcagtgggaggggaagtgcctaacctagccttgcatagacttgaattgccagggttgggggttactcagggtccccacctactcaaaggacaagagaaggggaacatgggcaaatgactatggtaggggatgactgggagggacagtgagcgggatgtaaagtgaataagtaaaaaaataaaataaaataaaataaattaaataagaaaagaagccaggcgaggtggcacacgcctttaatcccagaacttgggaggcagaggcaggcaaatatctgagttcaaggacagcctggtctacagagtgagttccaagacagccagggttacacagagaaaccctgtctccaaaaaaagcaaaaccaaaccaaaccaaccaaccaaccaaaacaaaagaaagaaaaaaaaaaacagaaaaagaaagaagagaaagaaacatagacagacagacagacagacacactcactacacacacacacacacacacacacacacacacacacacacacacacagagtcagtcactggagagacgtaagaaaggaaaattaaggatgagggatgagttcctttgactaaaatagtgttcacaagaagagagaagtaacaatggtgtgacttgttttctccttaggaaaatagtgctcagcaatatatttaaaagtcttgataaaggaagatattttacagaagcaagtattatgtttgtgtacataactatcctcttgtaatcttgaaaaagcctcaagtatgaagcagcacacacagacacacacacatacacacacaggttttattttcaaatagttttgctgaagtttcttactaacttccttaagattaatgtcatatttaaatattctctttttcctagaaatgattcacttgatggcatgcctgtttgtttacccagagagagtggagctgaggaagttggagcttccattgacactctaaactcatgtgagtataacttgaacagcatatttaagaaataaagagaatcatctcatgtgatttgcaaagagtcttgggaatgaaaatatttgagaattagcatggttatttgctgagtactggaccttggccatcctgttgctagggagttgggtgagattgtaaacccctatgaggagaactttgaagcagtctctctcacagctttccaggataataacctgtagtctcaggtctcagcaaacaaagcaaccttctttcacttcaatatcctcttcagtctctcctctctctctctctctctccatattatgtatctatctatctatccatcaatctatcatatatatatatatatatatatatatatatatatatatatatatatatatatacacacacacacacacacacacacacatatacacacacattagtgtcttgtgaatttgcatttatctaaagagctgacagtaatttgtcaatacacagtgaaatccaagggaatgaatgactttgttttgctttgtgtgtatttccagttcttcaaacagtgtctaaactgtgacagatcatcctggctgttggcacatatctgtaatcccagtacagagaaaggtgggacaaaaggattgcagcaagaccaagggcatcctgggctatattctgagttctgacatagcctaggctgcagtgtgaaaccatttcgcactttaatatccagataaataaatagagaaataattaaacaaagaagtagtggcatctcaaatattattttgacaattttaggctttcatcccatttctattctatttgactgttaaaatttaccttgaaacactgcttaaattctactcagaagtgtaacaatttataaaaattttcccctgtgttcaacttagagcaatgtttcaagtttgcttgtttgtcttttatcataatttattcacatcacttctacatttcagccctttctaatcagggaaattaatttagctattttgctagtctcactaactgttggataagagtttaacttatcaataattattagtcactttaattgctatctttaggtaataaaagggtctctggcatatttccaaccatatcagtattatctttgataaaatattcggctcctgaaatgaaaatttggctatttcatagggcagcgtactgtaagcagtcttatatatatatatatataagcagtcttgaaattactttaaaaaattaagttctatattgaagaaattatactattctgtatattattatataaccatttgtggtctattatcaaataattaaatgtatttgttaattcaaatgatgtatatacatatacacaaatccatacttttaatcttggttagttcaatgtgctattagatttttacaatacttaccaatttgatttctgaatatacatgtcttgtgtgtgtatatgcatgcaactttaataaaatcccatgtaaataaataagtgaactgtaactcctgtgagtcaacacaatcagagaagaaacaaacatagggtttaaggtgaatctaatgattttgctgaagacagatatgtaggaaaatatctgggagcagaaatctaacaaattagttgtagccacttaaaactgagtggccattgattaagtcattgtgaaggaaataaaatcctcttgcagtctctttatgtttctaataaaggcaactaatactacataaaataagacacttacaaagtgtttcaagattctggataatcagtcctgcctttatgtaatccttccctgctttccagatttgctggtcaaatttacttgttctttccagttcttccacctcctcttcctcctcctcttcctcttatttttaggtgtttggttatgactgcttagcaccagacagactttgtggggggctttttcctcgataaaatcaattcttctttcttatgctctcatcacccccttgattgcctgttgttcttcaggtggggctttgtaaaattttcctcatccacattggcatacagtctgatgctgttgttatacagacattgtttaataaactgaatgctgaggttttataaacacagctaccgagcatctctcctctcctctcctctactcccctnnnnnnnnnnnnnnnnnnnnnnnnnnnnnnggattctctgtgtgtaacatctttggctgttcttgaactcactttgtaggtcagggtgactttgaacagatcttttcttgggtctgcctcctggagaaagttgggattaaagagattaagagcatgctccatcacagccctcatatcttagtgtcatgtgttcacagcagttgtcttggtcctcttgattttattaaatttttgtccccacctaaggctaaagaaggattagtttttgttttttgatgtatcttcttacctgtattgagttaatttgccctgggttttatattttgaaatgtatctggcaccttgtgcctatcctggggttgtatacactgaaacattctcatgaattaaagtttttccatgacatacttctgccaggcctttccctagaaacaataaagcaagtcaataatgattctttggtggcttgagggctaaattatttttttaattaactattcagatttttttcattagtggtagctttatagacacagaaacaatttgtttaggaaaactgtgttggaattaatttttatttttctgctacaaaattttagaatgttaactgtccttatacttcatatttagctaaggtgacttgaatgatgtccatgcacataggccactcattcccagactgaaatttgcaaagatgatttattcacaaagcacagtcaaaaacttttagcagcaaagacaggatcctataaatacctggcaagcaccatggaccatggttatacaacctcagaagagattgcctagccctgcaacataaaataatatgtagagtatctttattttaattttgactttctttaaaaatctttttaataaatttaaaaattaatgcagcgacaacaacaatagtgaagattttctcaaggtcaggatcagccatatttctaggcatccctctttcccattcaaggtcactagggcatattcttctcaaagttgccatcacttacgaaatcaacatctttcccagatctccaaaggacctgctgaaaacgattttttagtcaatttaaatatatatggaataaatatgctctacagtacaaatataaagagtaaagttaatctacatatgaggcattcgtggacatttttattagcacaactgtgtgaaggctacatagtaatacaaggcagcagagtggcataaatagcttggctgaaaacacttcttcacatgatcttactgttctgcttatcctcatgaataagatattctgcctttcttcacagttctttagctggcattgtattgattggaactctgtaaaattataattatgattagtgattattatcaaattaattgtaacagttgaagttaaaaagcaactgtttttctcttaaaacagcagatatttaaacagatatttattgagaaaaaaaaactgtagtgcatttgaaaggttcccattttcctctactcatttaaattggtctctaaacaagccggaggagttgaattctgtgaaggtctgtagcaggtgaatttttctcttgtcttcctataaatgaacaacacagtataactctgaatcttctaggagaatcaactccaatttccatccacttggttcatctttttaaaaggtatttgaatctagaagattaatatggctacaagttaactccgttcaaatcttgattttcctataagggaattagtgtgctgtgtatgcacatctcccaaaagaggtctttttttgattgttgttgtttttttttttttcaaaaaagaggccttttgtggtggtcttcataggggtgctggttttcaatgagtcagaacattattttgccaatttgctgatgttttccatttttaaagaagagacgtgtaaaaccaatcacattagatgtctttcatctgcagagaaaccaaatgagaaacgtgcttggttattaaattacagaattagcctttgaacactttttattgtttgtgttcgaagaggcaattcttgatattaaacttaacactggaggagattactcaaccacccactgacagcattttagacttttcaatttagctgttcctatggaattgtgggaggaattataagcctactgtggaaaactgaataattgtagcagggatttatttatttatttttataatcctagcctaaaacaagattaacatagtgtatcatcttgaggttctgatttttttcacagagtgcaaaaataatatttgcaattattttataatttctcttagatatctctataaaggctaagttccagagaagcccttgttttatctgttatgcaggaaagtagatgttcaaaacaggtttaaaactataaattgattccatcacagtgatatcctaagatgaacctatttccagatagtgaattaagcaagtctcattaattctaagatgcacattttgtcgaaaaattttcaatcataaaattgagtcacatcgtatatagcattgctaaaaaatttagttttcattaagcatttcttttgcataatatataaaataccatggtctcttatttggtaatattttatttgtgtttatatttgtttctatgtatctgtttgtatgtatgtacatatttatatgcatgcatatatgtgcatgtttgttcctatgtatatatacatgtatatatgaaatgtgaatatatatgaaatatatatacatgtatgtatgtatgtatatatgaaaatacatatatgtgtagttgtgtttgtgtgtgtctgttttacatgagatatatgtttatgtctatatatgtgtatatgtatgtacacagcagtgatctctgaaagaaaaattaaactttacctctctcatgacatctagaaattatttttgttttacctattaaaattacaacaaaacaccataaaatttaaatagtaaaacacaagagacagaaattaattccatccttacttacttccatactgaggttaacgtgtgtatatatatatacacacacacatatatataccacatatatatacacatatatgtatatatatatatatatatatatatatatatatatatatgacccatttctcttttaaccttttatgtttattgagtacgggaatgtatattacttaataaaggaaaatatacctcgattccttaggaaacagtattaagagtaaatgaatttttcctcctccacttacatttttaaaaaaaaatgattctgctgcatctcatagtaacagaaaacaaataaacacacacactcatacacactcatacacactcatacatgcacacacagacacacatgtgcatacacaaatgcataactacacagtcattaacacacaggtgaaaatacatttggaaacacactaacacattcttgtcccagtaattccaataaaaccattatgtgtgtaaccctgaagtcaagtataataagtcaatcgcatgtcactgagtactcagcacttgcaggaaaaaacaccatttattgcaataatagaaattacatttaatcaatatgctctttgctttgaatccatttgtgactgcagaaaagcctttaataacatgtttcgagaaaaaaaattatccaattgaagaatatgcctaagagaaaaaactggctctgcttcattccaatttagcagctacaaaattgacacagattttatattttgtggcatcacagcacctatttattttgtgattgagtttttggcattttaaattttattggtcctatacattttaccaacaatctataactacatttatttctttttatatttcatgcatgtaaatgtatatgtgtgggcatgtgtgtcacccaacatgcatgtagatgaagtaagacaattttctggattcagttcttgccccaatatatgggccccaaggattgaactcagatcttcaggctttttggcaagtggttttacctactgtgcctctccttagatctactttcagtaagtatattgattttacttttatctaaattaggctatggcttagttaaactttcattgcgatgaagggacaacattaccagggcagttcttataaaggaaaacatttacttggggctggcttaccgttttagagtgtccgtccagtataatcatggtgggaagcatggcagcatccatgtagacatggtgctagaggagacacgttttacatcttgatcagcaggcagcaaaagaggactgtgtgtcacactggccagacataggcatatatgtgagccctcaaagtcctgccaccacagcaacacacttcccacacctcccacccacctttgaatagtgccactcactatggacaagcattgggacatggatctatggggaccaaacctatttaaaacatcacattccactccctggcctccagaagcttgtagatataacagaagtcaaaatgcaattagttcaacttaaaagttcccataccacttcacaatctaaacaatgtttaaaagttaaaaatctcttctgaaattcatacaatctctttactctaatcccttataaaatcaaaataaatgataaaaagtaccagatcagatgcttccaacgttaccattccaaagtatgggagcatagtgaggaaatactagaccaaagtaagagcagaaattatctgggcagactccatattcttcatcttcatgattaatgtcaaaatgttcttcagatctccaactcctttcaccattgttgactgcaacacaatctttttttgaggtggggggcagtttctactcccttttgaagctttcttcttcaggtatccttcagcattgctaacatcttggggtctcaaaagcaattcaactttacagtttcttgttccagtgactgggattgacaatgatcatctgggctcttttaaagggcttgggtcacttctctagctttgccctctgtaacactctaggctctttttgactccactcaactgttgctgctgttcttgatggtcactctctgttaacggcatttccaatatgctgtggtcttccatgcaactttcacaataacctttcataggctatctttgtggtaccaagcctcaacttcttagcatgaccccttcagtcctgtcattgaatgtttcctaatggtgtttcatgacctttcaaagggtcaagcagcagttgctcttcatcaccccttcaaaactagtataacaattgagattcttacacattaccaagcttggctgccattacaaggtctatctctggaacacaattactttgtcatctcagaatacacttcccagaagattctatttcagtgatgatgctgctctctttttaataacaggtaatttcttagctccagctaaccagtgtcatttgttcaagttacctcttctactcttgactctaaagccagccaaagcatctcagttctgctgcttgctggggcaggaacatagccccattgttctattacaactttacaatcttttcctttttaaattttattttcagcgattcctttattgcctaaacttggctgtcctgagacttgctctgtagactctctttgaactaagaaatctgcaagcctctgtctcctgagtaaagttttcagtatattttgtattctagctggtagactaagattatagtcactgacctggatttaaacaaaatttcaaattttgttttcaagtctctttagtcataattttcctcaaatttaatgtttaccatacagcccatacagcagaaactgtacatatgataaattatctttattttatatgtaagaaaagcactaataacagtgatataagaattttctttatgattatccagctagaaaatgatagtcttgaggttcaacatggttctcttagtaaaatcctactccctatctcctgtagtaattcatcctataatacccttaatttcacactgcatgcagtaggataacatccttccatattttataataactcccaaatctcacttgttttgaacactttcctgaacactacaaaaacttttaagttgactgaggggcctgccaatcatcttatctctgttattagtttggttaacagttactccctggatccctattgtttgccaagataaagaaaatgagggaaaagtcatggtaaaatttctctttcgtgataaagttcctgtctgatttggcagtgatagaatacttatctgtttcaaagaagagtcaaatcagatgggctgagtgcagttgttagaatctttatatcagaataggactggcacgtaaaagcagtgatgtgaagaaggcaaataaaaattatggaagcttcctctccgtggtcactaacaactcaaaccgttaatttctttttttttcttttttttttcttttttttattacatattttcctcaattacatttccaatgnnnnnnnnnnnnnnnnnnnnctggcgttcccctatactggggcatataaagtttgcctgaccaatgagcctcctactcacaacgtatttatttgtatcacaggcaagcatggcttctagttgtcactgcctagagattacctctgttctctgagacctctttacagagtctgactctgtgtgactttgacacagacctgagaaccaaaggaaacatgtcccttcacaattttatacaaaaaacagagtatttcctgggaattagatatgttccataattaggtactactctccctgagcgattttacaattcgtaaagttgtatcttaaagtctttaatttatcagggtcctttagagtaatataacttatagaatgaaatgcatatgtctgtgtatgctatttgaggggtagagggtgcccgagggataaagggagtgggataaaacccgcatccaaccagatttcctgtgctctgggtgagcagacatggaaggactgccacatgctttccatgtggcccacgtaggtgtctggctgtgtgaagccacataatctcagctcgctgggggatggacaaggagcagccctaagtaccatattctcagccttgggcatcccatgctaaataccaccgaagagctgagaacagaatgccccccccccctccaatgcagctcaggcagcttggtcagccccagggtagaagggaggagagggcaagaagagagggcactaggtggttcccacagagagtctttggtccggtccatggctgcaacacaggaaggccatctggtgggaggttagatgtggctcattaggagaaagcctatcccttctttcaagcaaggtggccttgattagcagagacagtctatgatttagagctttattgtggaaagtcagagaaaaagagagaagatagaaagagagagagaattcatcttggtagattttacctttgatgagtatgaagtgcccctccttgtctggaatgccagggtaaagaaatgggagtgggtgggtatgagtgcagggcggggggagggtacagggaacgttcgggatagcatttgaagtgtaaataaagaaaatatctaataaaatatttaaaaaaaggaaagagaaagaaagagagagaagagagagagagagagagagagagagagagagagagagagagaccagccatggtcatgtggagagagggggaaagggagagagagtgcgaaataaagaggtctagagaggggagtaagaaaggctagagcttaaagagagcaaggaggggccaagcaggtcctttcatagtgggctgggctatcaggtaactgtggggaggcatacctggctagaatgccaggagcttggggcattgtctgcatgactgatagtcacacacctctcctgtgcgggctgtggaggtggtaacttcaacagaagtcaggggtccaggatagatgatggaaaccttccatcccatggaggtggaatcacctcccattgggtctcttggggttcaagacctatgctctactggagaccaggctatctttgcacagcccactgccctatacacacatatacacaaacacacacacacagaaacatgggatttattcagataatttacaggcttcgattcagctactccaacaatggctggctgtaggttgaacgtccaagaatccagtagtagttgctcagtccaccaggctggatgtctcagtggtctttcctatgttcctcagttctgaagaaggctttaatgccagtgaaggaataaatatgatagcaaggtgagagcaagcaggaaaagagcaattccttcttctatgtcattgcggtggtttgaataggtatggcccccacaggtatgtgtttgaatgcttggacatagggagtctgaggacaagtggccttattggatgaggtatggccttgttggaggaagcatgtcaatgtggagatgggctttgacatcttatataagctcaagctacacccagtgtgacaaacagtcttcattctgctgcctgatgatcaagatgtagaactctcagctcctttctagcactatatatgcatgcctgctgccatacttcccatcatgataatagtggactaatcctatgaaagtgtaagacagccacaattaaatggtttttcattatgagttgccatggtcatgatatccctttacaataataaaatgcaaactaaggctttcaacagaatgtatggctcacatcaaagtcttgtcttcctgcctcaaagatcaagataagaagtaaaggattcactcagttcaaaacaagcaggtgtgcccacaatttctgtaatgtagtctatttcagatgtagtcaagctgataaccaagactagtcctcatagttcttgtgaaaatattgctattccccctttcacccaaacttttttgaacaaattcttaaaattataatcttgtgaatattaatgatgtatcctaacatgcgctgtccaagatagtttttcagcttgacacagataaagccatttgaaagaagagaaccttagataagaaaatgcctccatggctttcagttgttcttcataaaagactctccatgagataatggtaaaaatgaagtaaagtatatgtgtgaatgattatacacagggaggcagttttaggacatgattcatgacctttcaattactatggtacaaggaaataaattgtacttttctactaaaaaaaatgcctacataagatcagtctgtaatcaggtaaaccattaaggcatttttctcaaatggtggttggtagggaagaacctaaattgttggttggaacattcttgggatggtcgtagtgagttctataagaaaccaggctgagcaaggcagtgaacaacatactttcaaggcttctgaatcagttactgccttcaggttcctgccaggttgaagttcatgacttggcttccctttcataaaggactgtgactcagaatatgtaaacccaataattccttttttccttaagttgtttttggtcatgatgcttcatcacagcagtgtgaccctgagacatgttaataaatgcattcatttattgtggaatagtagtgcaggttgaatatagctctgaaatatttatgtttttgagttaaagcatttaaaatagtttttccagcattttgaatttttgtacatagtttaattatagtaactttactgtatactcctccgcatatcataagatttattctctattgaaaaacttaccaacctgcctcttttgtgtgtgatcagttgtgagtatataatacttgacattctgtgccttagtctgtgctgtatgaaatgacagaatttagttcagttttatagtcggatgctgattaattacacatacattttctttagctgttctttatttaatgggcgcttgtgttctttctcttcctcggagactaaaaataatgctataattcacactaaaagttgatattttttcagtatacattaatttcttataactattcaaacagtagtaggatcggcacttctaatgtgcattttagttattctatgcttaatattctgagggggtaagtattgatttccataatggctatattgatttatattggttcatagagcatgcaagggtccttctctttctcatccttgccagtagctattatcacttgaaagtaggtgataatatttgtgaaaaaattatttcattgtgacttttatttgtattttactaatgactggtaatactgagcattttctttctcattgaccattatagatcaattgtctgttatgaatgtagttattttgatattgacctttatccttccttacagagtctttcatttttattaaatcacctttctttgatacattctaagtaccttcaagaatgtggtgtctgggtaaatgaagaaagagtttggaacctgttttctgtaccaatgcgtttctttaaaaacaaaatatccaatctcaaaggcttaactgactccttctcactgtggttctgacacactgtgtctacaagtattttaaaggcatatttttttctttttttattaactattttctgtatttacatttcaaatgttatcccctttcctagcttcccctccccaaaattccctatcccctcccctccccctgctcaccaacccacccactcccattcctagtcttgtaaaggcatatttcttaatttctgatataactatttagattcctttcagttcttattctttttaaattgaaataagggattctagagcacataaactccattaagagaaacatagtcttgcctctcattttctgcttgaaaggattaattgatacacagtagtggacaccggcagctcacatgctgatctcttccaacctgttaaccatggttatgatgctcttagttctgatcattccttatgaatcttttttccctggggactatggatgagagccatttttctgtatttcatttcgtgctgcaatcctctgaaatcattaaatatctttatccttttcaattaatattaattggctaattaccttatggactcttcttttttttatccccggtgtattactaaatagaaacaagtcagagtatgaacactctatactataatttaccaccaaagatgaaactctttaattctatggaatgtctgtcaactcataagcagtggtcacaccatcacaaatagagcttttgataactcttttcaaaacttggtatcaattttactatgaaggattctccttttagatatcataccatatagaatggttaggataatacatccactgtcttgttgttctaaatatgtgaccatttctgatgaataatactgcaaaagtcaatgcaaacacaattgatctgattagaattgaggaatgtggagttaattggagaatagaaaattatagagtgtttgaaaggtttctttattttgatagagagataatgaatgaatggtaatttaaaatgttctatgcttcttgtggttagcatgactcctataaatttttgtttctttgatactggtttctgtcatatatacattcaccccacctccaataattagggaagtcttaaaataactgagaatttactgagactgtaagtatcctattcttaaaacttatcaactaatggaagatgggttttgatttgggatattattgatgaggtagggtgctatgtcttgattatattagatgtgtatccctctttaaatgaaaacaatgatttttaaagtccttaatctaacattatttgtctaacttcttctttcttcttcttcttcttcttcttcttcttcttcttcttcttcttcttcttcttcttcttcttcttcttcttcttcttcttcttcttcttcttcttcttcttcttcttcttcttcttcttcttcttcttcttcttcttcttcttcttcttcttcttcttcttgttcagtattttattgacttgagacaggatttcatgtagcccacattgccttgaaattgctgcacagaagtagtagatttgtacacctaatcctcctgtctctatcacaaaggctagctgttctagcattgtgtgttctgcaaatatccaaaactcaaatatcaaattaaaccagtgatcattgagaatcatgttatttacattcaatatccatatgtttttgtcattattgctcatatgtccactcattaatgcaacctatttatttgttcatattgtttaaaatattttccaaatattctatttgaattgaaaaatactgcatcaggggagcaagtatttgaggcaagaaaaatccctcctatgaactaatgaatcaattgctaacttcaagattattaaatattacagaaggtattaaatactgtgaatcagaaataagcatatggagctaacttattttcacatgaaaatgctttgacatggcaaagaatgataaattttctactttagtactgcagatggttaaatagctcaaattagtcaaacatactttaagacttaaggaacatagatttttaaaaagagatataatttcttcctttgtacttagtttaaatgaaccaggtggttagagggagaaaatttggataaaaggaagatgtgtgcagtagatacagatagctctgcttctgactgacattcagggaagataatttctgtctataaatctcaggttcccaagcatacatactcaaagataatctgagttgaaaatttgttaaatgtgagcaaatattccaatttaaaaatttaatgaaagaaaaaaaatgggtgaatgaatgaaaatacatacaatagtagatccttaagtatggatgtcagagacagctacattggatgtgttttgtgttcctgtgtgcgcctttgtgtgtgtgtgtgtgtgtgtgtgtgtgtgtgtatgtgtgtatgtgtttatacctttgtgtaaaaattatcaggcattatatttttgttcaatgccaaataagcactacatatatcagcattatgttacagcttgtaatactagtgtgtgtgtacgtatgcgtgtaagtattcataacaaaattgtttaataatttttttttgcttggatgacatgaagtgatatgtcctaaatcttattatttatacatatacatatgggaaattcttaggaatgaaattttcaatgaactccttatatactgatcagagcaattaatgtggtttttatgtactcagcacactgatactgagttcttttattaacacatattttttgaaagcacccacattcaaagcaggcatgagaccttattgctcagctaagtaaacataaatccagcaacagaattatatcaataccacactgtttttgcttttcttacactggttttgagtaatgcaaagactgaatatccatgtagggtatgacttccacttaaaggctattgttagagcttattgtattttgcaatactgagatgtaggaccctggttatcctttattttgtcaatttaccccaaaacattaaataagataatgtgtttttaaaatatatttctccaaggtgagaaaaaattagccttcactacaataaattccctcaggtataaatcagaagtttagggtttggattcagatctaaagctgagaagccatgatcactctcttactctgtgaaatctaccagaattatcaaaacacacagaattcattacaaatgccccaatagtctttagcaactggagcttatgcaccataggacattgtcatgatttaacttgaaaaaattcatgttctataatcagtttcaggtttagttatttgtagaaactgagtagccattggttaaacggaaatgttctctaataaacagtctagatggtttttgaaaaaaattctttagggagaattacctaattagctatgcaggaacaacctattgcagttaaaatttaaatttctatttcatttattttccattatggtcacaaagacgactgaattaggggaatcattctgagaattcacgatatatgaggaaaagttcatttcctatttacctaaagacacacacatattaatcttgatctataaagtttaaataaagaaatcaataaaaaatatatcattatattcatcaaatttcactgctcattggattcctgctcaccatatcttcactcagatgtgaagtgttttgaatatggccacagatagattttatacaagtatatacttaattacggcatgcatcagcaaagtggaaaagtagagattaaaagtaggtaagacacttggaaattctaaagctatacaagagatgtcgtgaatcattatttgtatgttctagaattgcagttggaatttaaagtggtgcacaaataatttgtgctaacaaatacccttaaatttacccacccacacaactgatgttttaaaaatactaaagtttattaatttaatcctcttttaatttttaatatttgatggaagttgtgatatatacaataatacaaaaacttgtgcagatgaagatactgcaaggataatttaaaagacccctttcatttaggatatgcacattagtgactatatactactaggatgtcaatagagtcccttactacaaggaagaacactagttcatccatacatctgcagaggctatgtatgacttaactttggtcctgtgtttgacaaaaatattttagtctttattctgttcctttacctacattcatgccttaacctagatccattgaaaatactcttctttgtgcaaatgagttggacaagttcattaccacttctggaaaacatcttgaagcttatgtcatgctgagttagtggttttgtaattaaatgtgtgcagttttattttcccaagtcgatgaattaatccttgtgctatgcagtttcttattggaaaatgtaatgctctatttgttttccttatacaaaatggcataactgcatcttgcctaatgaaattttataaagttgtttaatagatatttgatatatgtatttcatgcccctattcatataacacaaatacaattctacaaataaaccctccaccaatttctctatattaagactaatcagaaatcttaaagacatgtttctctatatacacacatacacaacatacacagcacacacacatatgtaaccatatatatatatatatatatatatatttggttaacatcatgacagtatgtgtttttagactacactcccaaatatcatcaaagctatattttattacattacatgatctcatttttgttcctgtttttttcttcctctgcttgttttcagcagttaattttattatgtgtcttgggtaatacactacataaggagatgtttaatatctatttgttagatccaataatatcttctatctcctagaatactcacagatttaggttcagacagaacatcttgctacacaaattcgtctgagaattgagttaactaccccacataaagagactacaaggaacgctcaccagatgtcagatgtgaaccctattttgtcttttcttctgccacctttacaaatagaggcaaggcacagaagagtaactcatacaaaaaagaactgcacggctattcatgtcgttactttttaacgttctgcactatattcactatttccataaatacacctgtcaaatgagtggatgtcattgttagaaaatgttcattgtcctacagtttagctgctatcttttgggttattttgtttggtatttgcttgttttgcttttaaatagccttcctcttttgagtttgactttctcccatgtcagcttgacacaagctagagtcatcagagaagagggagccacattgagaaaatgcctcaataaggttaggctgtaagtaggattattacttctggtcatggtgtttgagcatagtgatagtaaccctaacaaataagatttctatacgcttccatgtactgtattatgtttctatgaatggatgtcttcatatgttgacttcaaatattatctgctgaagtatattgaattaaagttagtagaataaagctagtttaccaaccgataattaaatccgtattccaaagcatgaaacaaatttaatactatgtgaaagactaatatgaaagtagatcctgtatccagagtagataacatgaactcatttaagcagttcagaaaggaagatgttgatttctagctctgtctcctatagctttagaaatatttattagatgttataggaatgccacactaaatgtaaattctatataaagaaaagacacttttgaagtgtttattaccccatttgtgacatctctgtatacaaactgttatgatagatgtaagatcagggactaaagtgttctctctttggcctatctctcctagttgcatgcttcctaaatggcgtggataatgcgtccaaaataccctgcagagtattttgctagaagttcagtaaatgtttgctgaattgaattgccacattaacatgtaaattgtcagattgcagagtttacagcttgtaaatcttattttaaaaatctaggtttacacaaatttgcatattatttagaaaatgaataaattaaacccaaatcagtgtctcatttatatgcatttccacaccctcatttgaatggtttaaagtgctactactggccagcaagtttgataggcccctaagcaatgttcatataggaattaattgtttcctttagaagaatgcccacaaaaattattatctattacttaattttccaaatgaaaattcttcagaaaatatagctactactcacccacaatcttttagctcagtgtttgaaaatatataaataattgaatttcacagacatcttggatgcttctccaacaaatacttttgatcaggtcatgtgagtgaattgcaagctacagatatcgtgttttatgctctcccccagtgcaaagctgttgtttactgaatggtcatttttggctaagtttcatcacaaaaccgtgtatatctgagtagctttcttttcaggcacttgtgaatatgattgtggccctgaagggggtaggaaccccacaggaagatcaacagagtcaattaatatggacaattggggttctcggagtctgaaccaccaaccaaagaatatacatgggctttacctaggcttctctacatttatgtagcagatgtgcagattggtcttcatatggatcttgagtaactggaatagggactatccccaaagctgttgactgtatgtggatatgttctagctgcgctgcttgttttgggaaacatctaacctcccagagccttgatgtgacagggtaggggggatactgggggggtaagatggtgaacaggacgtaaagtgaataagttaaataaataaataaataaataaataaatatgtttccaagtttttttttttattttaaacacaaagcctggcttattcgtaatttctctttcattatcattgttttattttaaaaagtacaatttataaatatttatcgaaaaactgagaaagaacatccaatatattagttaaattttaatagccatgactcaaaataatgctgtactcactctggagctatgtcttttaattgaaggtttacgtttgatgatggaaaaagtataaattatatctcatataatagcctatctacaccaattgcaactacctgcacaaataatttacctgatgaatgggaatcgtttagcgaggggatagttagcaaagttttcttagttggtttgttgtttttatttttgattttaaggtaagggttatttagaggcagcgaaaagaatacactttcatcttttaagtgactcagaaagagcaacattgatatattcatgaatttaaacacacttaaagccaaatcatggcacctttccagatccatcaagacatcagtttacttttactgggaatatgaaaggagactaagagaaagccaacgctgcaggaagctacaattatgttttacaggctgcaatgttccagggtgttcagcggatgatgtttttgtcttgtcgtcaataaattctgccccatgtttctataatcacaatgcagtttttacagtaggcaattatttttaattgtacggatacgcaaccccttattaagttaagaggaagagagttgctgcacatattaaagaaactgcaaactccagtaggatcttttgatttctaaatgattttgacagtctcttcaagagtggttgccccattttcctccttgaatttaaaaaggttgttttttttttttttaaagggaaacttctgacagcataatctctgcatgatttttgtatggcagattagatagtgaaaggttccatctaccactccccaaccaatcaattgcctgaaagactagctccatagttctgccatgcctgtctgagttattttatttttaaaagaacattgaatcacaactgttgagagctgcatatttagggaaagatgccatctctgtctctggaggtttcatttaaatcggaatgataacaagttgaataggttaaaagttgttgctatttgactggaaacaaattcttctcttaatattgcacagttgtgcatgtgtgtgcacactcacacacacagaaacacacacagaaacacacgtgcacacacacataaacacacacacacacagacacacagacagagacagacaaagactagagagacagagacagaaagacagttagagaaagaacaccaccactaccaccaccataccatcaatgtttattttaaatatgtactaatccttaattatttcaagtaagattcaatatttatttattgattgattcatattattttttaatctttttacagtccagtagttattttcctccttgtctgccctctgttcctcattcattttttcttgcccctatctccaagagtatgtctccaaatcccctaccccaccagacctggggtctcaagtctctgaagggttgcctgtgtcttatctcactgaagccagaccagacagtcctttactgtatatgtgttgaggggctcatatcagataagatatatatatatatatatatatatctgttccttctttcttcttttttttctttccatcttgaccagttttcatatcaattcctcctccctttgtttctttgcataaaatagaatatttcccatagatatcaaacacctatggcatttcaaattacagtaagtctaggcacctccccttgaattgacccaagaggaaagggtcccaaaaggagacaaaagagtttattttcactccatcaattctgttttcaattatatactcccttagttactgtttcataatattttttcagctctacttagtctctgtgctattcagctttgcaaaagattttaatatatgtagcagataataagcttcttataaacaaacgctactggtctttatactatacgtttctctcttcatgcaaataatatatacatagagagcacaagcatgcataaatgcaaatgcaacccatatatttagactgtaaatattatgtatacatgtctggtaatgtgttttgtgtatataaatttcactatgcattcattgagatgaagaagacagaaaacataatttttcttatacatcattacatttactggaaatgttatattatactatgtattgtatttcataaattatattatgaattaaatcaaaatttccttttgaataaacagtttagctaaggtgtttgacctttgacctcagaaacaatgttttatttgcttttcaatgatattataaagcataatgacaagttttccatgagctatctccctctccaaatttactcagttatagaagcttggccacacttagtgaaagtgaatttgacaaattagatatcattgttccagcaaagaaatgataattgattgccaaaagctttctgttcccctcctctaaaaacttaaaactaacaatcctcacaatggacttcactcaaaattaaaaatatatatatatatcttttaaacaaataacatacttgcatattttgtaataagagattgagctcattttctaccccagaaaaaggaaattgagtctttagtcaaaaggtggcagactgttttagcaactcatatgactatgaaggattcactctgcagtgaattttcaaagtcagccttgttttggttcttgtgatctcttcttgctcttcaatcacatcttcttaccacaatgtataagactctctttcttactccttactgtatggaggagtaacggagagtgttcactttgtaaactctgggttgtaaattttcaaattcaaaaacactgctagagagtgtttgcctctaacaaaatatcttggacacattatataaggttatagaataactttaaattcagtgttttgaaacattattgtttgaccttcaaggctgattagaaatatcatcctttaatatctatgttggatgaagagtgagagtgcatgtttatctttgtcaacatacagtctgcatgttgtcccttctttgtcactacttgcctcttggttcgtttaatctctggaatcccagtgtgttataggatgcacagtagtgtctagtttcacacctcagttaaacacatccaatggccatatgttcccttatcattggtgcaattttgtaatatttcccaaatctgcatatgtcatgagacttttttctatgaacagtaaagtttaaacaatattttttcagaattttaactatatttcaattctttgagaatatgttttgtgtagagacaattaaaaaacagatataaaaggaagtattatcaaaatcataaagcaacaacccacatggcttcacaggagaagtctataaagccttcaaatgtcatgccgcccacatctctacatatttttacaggattaaaaaaagtgacagaacccttcctgattcacattatctccctcccctctcctctcttctttactctccaatcccttctctatctcatggacagatcagacttagagcttgtggcatgttaagcaagcatactatgccactcagctaaactctcagccccacaatcttgataactaattaaggtataaagtattaataaatgccagtgtgtagaaatattttgtttcatactgaatgttcacacattcttaaacattctctcatatacacttattcttaattacaagatgaaaggcatcttacttggaaagtcaagaaaccatattaaaccaactattagtgctgtgacaagcagatgtcagtctttgatccactaatcgctcccatcccaaatgttgcttccattttccccctagagagtagcatgtgactaagaataggacttcactaattaatcactcgagcctctttagaaatctgctatgtgtgcaatcaccacataggcttcttttgcctttatcacatatagctctgctactcagaaatatgcttcattaagtcagttttataaagagcacaagtctatgttcggaagagaacaattttgtctatggtaatcataaagggcctgaattagagtcatggtagctgttttaaaaaatagatcaaaatttcatgactaaacaagaccaaagtttcttgcttaagaaatagtttggcaaacatcttcatgctataacctctagagacatgacttcctttgcttttagatgtcatgaagaggaacatcaagggttcatgagtcatacagaactgcaactgttattccattgtgggccacattcacagcaggaaatacagcaggtgtgatgccatcatgaagccaatgaaaggaaaaattgattgtgcatctttcatttccatatgtgtcttctcaaactccatagggaacaataattccaatggcctcttcaaaaagtgttttaatggtcacctcctcaatcttttcattttttaaatttttaaaaatcttttgggtgtttctgtgtaacagccctggatgtcttggaactctatttgtagaccaggctgccttgaattgacagagatcttcctgcctctgcctccagagcactgggattgagaacataagccaccatattcagctccacctacacattcttaatagaactctataatattcttcctcagaaaatttttacaaagatattttatcgtccatctatgtccttaaaggaatggaatgtaccagctgttctggaatcttctgaaggttccatgtgcctaattttagcaatggcatgtctgaggttcagatgtttatcatttacctggaggcactaattactatgaaaaaaaatccattaaaattggaaccacataagtcagttgaacattttttaatcaaataattcaggatgctgttaaaatattaatttcatatcttaaatatttatgcctacttgaaacccactaataaatggtaccttgccaattttcagtgcaagtcaaagtctacataatacaactcaggtgtctatcattcattaaccgctccaggatcagagtctacctacaactcctagccttaatctgttccctttttcttttcttcccaacccttcctcctctctctctctctctctctcctcctttctttaccccctctctaaagttctatctttcaatctttctttctactttgattaaagaatgaattcagagccctttaagatttagtatgagatcagagtgtattgagagtgatacaattttaacagtctttaccagcctgaatttaaaaatattcacaaaaatctcaattcctaagtgatgaatatttcatagaaacaaatttgtgtgtacagctgtactttgtaagtttatgaaatatttaataaaaattttaaattaaataataaaaactgtctaaaattttgagagctactgttataacaattctataaatgtttttgatttattttgaatgccattttaatcatataacttaagcagggtaaaaaacattttattccttttggataaaaaaattgattttataaatctggaagtaaagtcttagtttggacagttttatgcagtatatatagtttacttctctctgatgagaaagttggatatttcctgtgtagtcactgaatcattatgttgattgttctcatttgctctcatttatgattctgtcattaggtactcacctgtgcttagaatctttctgacttacttattccttcagtctactaacgtctgttagtattgttcctaggtttctgaattctagaaaaaaattccatcacacctgcttgttaagttcttgttttctctatcttttaatatacagagaagtaaaaatacatacattatgcttgcttcagagcatccaacccttttctcataatacagtgcattatagctttcatttctaatataaaattcaagtttaaatataattaatgtactcctttgggaaatgggtaaatgcaaaaatgctaaagtaaaattgcatatgcatttgcttgtctggactgcagatactgtcaacagattctgctgtcataataaacgtgtgtgctagaaattagtgctagaaattgtccatattagaaatatcctctcaacttctggcatgttactgatgttttctcttccatataaactccctttactgtttataggtttcctaatcattcattctcctctgaataatttctatttttaattagttgtctctgactcacttctacgattatagtaacatcagatgatatgacaaaggcaggtcacccttttttaacagaactccatacctgagagagagactatgtgaatgaatacaccactttaaacatgctatttcttatccccttcataatttaaaactgtattttcatgtcataacttattaactaattctacttatatctaatatgtataatctagatatacatatatttatttgtataagcaataaaaataatgcagtgagaatttctagcttctattctctttatattccatctgttgtaaaataaagtacttaaaatattaattgcttctaattgtttgttgagacacaactgcatataatttgttgtattctcattaaattatcttttagaaataaatattaaactacaaaatttagatattcaaatgacatgcaaattttaattaatcacaaaacaaacaaacaaacaaaaacttgacttttccccaccacacagagctcaagtcagtcttgaaataatatacttcaaggtaatgtcctgagtgtatgctttctgctcagaatggttatttatagttggatcaattaattcctagaatctgcagggtaaagaatccctttatcctgtcatcctatagagctaagtgtatggtctatgctgagctgaagcaaactttaaagctgatcaaacttctaagcaaaatcctgtattacgattagtgatgggtctgatgctgtgaagtgaatagaggggaaagaatcatagagggttcccaggttggagttggatgaaagagtcgtgggaatgaactgtatatctggggcttattccaactgccttggtggctggaactaggtctgaaatcttgttaggacaaaccttcttgggatactttatgccttttctctttttagtaagatcagatggaccaaaggagcagtttgctttttcaaaaagcaccaagagaaataagatgggaatttcagatacagaccacagaactgacaagtccggcttagaagacaggacccttcaaagtttctgaggctactcagagctaatttataagcgagtagcatttatagaaatgatacaatttgttttaagtaattaaattaggtatgtatccaaatttggctagtgattagaatttcacttttatctacatgtaaaagcaaataaaacataagaaaaataaataaaaatagcttgtgttgacttgatttaaaaatttgtatacacatcattgtgcgttatgtatctgtctttctactgattctatgaaatgggagacttctaattcactagacacacattttttcctgtttataacaaacctgtcaggcatcttttatctttgtagaatatatgaatgagcattttcatatctgaaagacagacaaaactaacagtaactggatcataagatccttgtgataacaaattaaacataattttgctttgacaaccataaatcaagcattttatataaaatgtagggaatgtgttctttcatatatattgtcttactttaaagaatgtggaaagcattaaaatgaaaaagcaatttaaaattgtgggcccttcggaaaccaaatctggttagaaaaaaagtttatatatttgatacttaggtttatttactttttttttttcttgtttcttttttattacgtgttttcctcaattacatttccaatgctatcccaaaagtcccccatactctccccacactcccctactcctgtaacacattttgctgtatatagccttaacttttactattactcaatatatagtattcaatttacattattattattattattattattattattattattatttaagcaaaactccgtttgttctatgctttaggagatttttaaaggatgaataaaacataaacacacaccactaagcatgagcattaaaaactagtaatggaagcatttaggaaatatttattttatactttcctatggattgtgaatgtagctcagttgtagagcccacacaaggacctgttttatcctatcagtgtaaatactaaacattggagttttcgtttcttatttcttttctttcttttttgagatagatttccctttacgcttcccttccctcccttcaaatctttccatatatgaacttcctgttctcctttaaattcagtatctttattaattgttatcacgtacaatgtttttgtatttatatataatttcaattcctaaggaagaccaatttagttcatataattacttgtgtgtatgctttcgggactgattgactagcaccggtcatccagtcagtatgaccttcccttgagaaaaccacctctcctgctctcagctttcttttttattaggttttctttatttacattttaaatgttatcccctctggaaagcccctatccaatccctcctcgccctgcttctatgaagatgttccctcacctattcacccactccctcttgcctgtcttggcattcccctacactggtgcactgagtcttcacaagaccaatggcctctcctcccactgatgttggacaaggcctccctctgcaatatatgcagatggagtcattgttccctccatgtgtacctccttgttggtggtttagtcccagggagctctgggggttctggttgcaaacctcttcagttccttcagtcctttctctagttacttcattgagggccccatgctcagtccaatggttggctgggatcattcacttctgtatttgtcaggctctggcagagcctttcaggagacagctatatcaggctcctgttagaagaacttgttgacatccacaatagtgtctgagtttggtaactgtatatgggatggatccccaggtggggcaatctatggatgacatttctatcagtctctgctccacacattgtatgtcctccagtggatattttcccccttccaagaaggattgaagtagccacactttggtcttccttctttctgagcttcatgtggtctacgaattgtatcttgggtattctgaacttttgggctaatatccacttagtgagtgtataccatgtgtgttcttttgtgattgggttacctcactgaagatgatattttctagttccatccatttgagaatttcatcaagttgtttttaaaaactgagtagtactccattgtgtaaatgtaccacattttctgtatccattcctctgttgaaggacatctgggttctttacagcttctggctattattaataagggtgctatgaacatagtggagcatgtgtcctgattatattttgtagaatcttttgggtttatgcccaggagtggtaacactggctcctcaggtaatactatgtccatttttttttttttttgatttcctgagtggttgtaccagtttgcaatcccaccagcaatggaggaatgttcctctttctacacatcctcagttgcctttagtctttttgcgtagacatgaggttctatgggctttttatctctatccattttaagatgtctattattgtccatattcagctcacgtttaggcagtcaagttactgagactatggatgtagcttctaatattagtgggaaatataacctgacaataaagtccctaatcctctagctcttagcaatcattatccctgcttagataatgttccctgagccagaagtacaggagtgttttataggtacatatatatattaagactgggtgccacaactgttcattttgattggttgtggctttttgtaatggtctccatctgccacaaagagaaatttcattgatgagtggtgaagaccacaatatctttggatgtataagaacatatctttgtagattgatgctagtggttattcttggttagtaaattagtgattgaaattcctcttccaataaacgtaactgtgctgatacaattgatttgctaggtttgcagtaccagacatggtttccttcttgtttaacatgtctttaagtccaatcagaaaactgatggtcatgcttgaggtgtgcatgatactgctatacccttaggatgtattggcatgctgattgttcatgtggttcacaggcattttattttttaagatgaaaacacagcaaacaaataaacaaacaaacaaatacagaacaaatccaaacctggtaagagttagggagtcagtttacaatttgttcaacttgaaagcagtactctagtttctggattttatttctacatactgtacaagtgatacacaaaactatgatacatggcattatataatgcagcctagaggaacaaagacaataaaggattagttctcgtccctataggatacagaaagggtcatagagctttgtataggagcatgacttgcctgtgactagaaatatgctggtgtttcaagaaagagccagttgtaaaaatgtagaaggtagttattagattcatgtatattttgctgttgttgctgttagctaaagttcttgaatattcagcaaggtaaggagcccaaggggattgtgcataattctgttgttgggaaatcctaacaagctgagattcaggaaatgactggatctaagccagacattacagtttctgacaaaatctcatgatcgagttactttttaatactttgtaaatttatttttccattcagaagaataaaatgataatatcactatccctgtaaaatggtcaaaatgtacttctaatggatttatccagtgaatagactgcccgcagtctaatgggattcttaagtgtacctaaacaggaacatccttcagaaataggagaaggaaatcttttgttagctgtgttctctctctctctttctctctctctctctctctctctctctctctctctctctctctcctttagttgatttatctataaatctattgtgctgttttgggaaagtaattatattttggatgattgattctctaaacgtgcaagtgttacagaattttttgcaaaatatgtaaaactttggactaaaattatatataatcatttagacattaaattatttattactttaggaacaagtttagtactaagaagttaggcaagagaagactgactatgcatctttatatgaaattattgaatgcattacaccaactaaatgcaaatggcctcatcgatatatgtttaaatgtttatatttgtaatatttaggttatttgtagattactttgtattctcttgtaactagtttgaagtcattaacgagatttcacttaaattccaaagcttgaatatatagataaataggataaagtaatatctgtccctatgtgtgctacagcacattacataaacatattactaaacaacatattaataagatattacataattgacagcacagtacagaaaaaggtgttttgatcattccttcaaaattaatacttactataattattaaaatcagtaaattctttcttgatcacaagcagaaccgctaagatgaaatctccatgttcttgaagttctctgaagcctgttcccactctcttttgtattggtgtgatggactgaaacactgagaaaaacaaaatctagtcataaatctgaattaacattggattaactcatgcttctctcccatttagttatttaattttgacattgggtgtcttttctaatttttgggactctaagatcttaggtggctttgggggcagtttccttagttaactagaccacttcaattattggagtgttttctttcttaataaactgtaatttctgcttcatgcctcatttaaaaggtgacttttgcaatctcctcctgaaggctgccaggatttatacctaaactgtaccatattttcccttaaataccaatacaattgataaaaagaaagaaacagttctacttgtctttagaggtaaatttgaggattaggctggcagaatttacacctgaattgcactatagttttctttaaacactgataaaattgataaaatagaaacagttctacttgtctttagaggtaaatttgaggattaagatggaaaaggtgtgtgtagtctttcatcagttagaggttgataaatgttagaagaagcactctgaatgtctatgtatttctctaacagtctccctcatggagtccctgttgttcttaccagtgacaacctcatgctataatgttgcttcagatgatcatatttttgagaccacaagcttttatttttaaacctcaaaatgcctaaagtctcaactccttctggcaatcaatttgagacagtcttctataaaatctgaataattttgaaagcagtgaagaaaactatatggttgtcaggggttgtttagaatttttactttatggtgattgcctaaatatttaaaatttccttttttatttaaaaagttgtgtgttattgtgtacacacaacatatgcttaggtagaggtttaagtattcactgctttgagacagaatcaatataaatgccaggtttattttctcattaacttatactattctataaagtagatatcatccctattttttttaacaaaacaacattgtatcatgcaaagatcctgacaaacttatctcaaggtaaacgttatatggtgatgtcacaaacacatatgagacaagaaaaacaattcagtgttgcctctagacaatttctttagaaatgctttcaagtagagcttctccaaaaaaaaataatggattagattttagtttacttaccttgattataaatatttagtatatattcatatacattcatattcatttactcctttcctgtttgggaaggtatatgcctttccccccctgttgtatttgttttgtagtgctaaagatgaaactcagaccttacaaacaataggtaagtaatctgccaatgaagtacatactacccccaaattttcagaaagataagattcaaaaacctattcttcttatgctgattttcaaatgattatagagtgttttcctcattaaattcttatctaatttccataaggaatttttaacagtcaaggaaagtcttatcccacagtgtatatttttctttaaatattgatacatacagacatacacacatacatacatacctgaacactataaaacattcataggtagacagatgtgtcattccgaaagacagaagctttgcatcatgtaactttggaacattctattcacagtaagcaatatacctgaaaatcatttcttgatgatagatttactttaacaaagctgacctctatatttcaggactgggtaccctttataaagatgctcaagaacatgttttattattttcttgaactttcagatgcattataattaatatgctaccaaatgcacatttttcaattattttgacttggtgaccatagagtgacatagtgcattaaagtgatacactaaattttaaggtatttgacaggtgttgccaaattgccctcttaaaagttaaaactctgtaggtaacaagtatttggcagttttattaataaatgttgattgttttaaaggaagtaattttactatgataataacgccaatgatgccttgaaggtattataaccataataaagaaagttatgcactttggtttgagaactttatttgtgctgccagatcattgtcactatgcaaaaattttccattaaagtcatagatgtactaagatatgtaaagacaagcttttattgtaagtacatcatattattcttcaaaagtttgaagcttggctaactagaagtaatttctttattttatgttgaagaaattagtgtatgattttatcataaatgaaacttatttttccaattacgttcatgaaagagctcatatcttgaatgtgtaacttagctttcccaagggacacaaagatcatgtaagtgggatgctttttacaaaatagtttttttctaagtttatttaaactaattaaacctccttcttcaaatctatgttaaaaacaagtgagaacatatgtttcatagatatattttgtatatacacgtgctgtagattgaatactaacattatagtgtcaaatttatatagataaaatatgatttttacctaaaagtatataaattttaacaaaaattaagaaagaacagaatatctaacacaaattgcatttataaatataatttacaatgcacttttgtgaggaaaacacaagtcatataactcatgatgtcatttctttgcaaagaagaaaatagagttatttgctatggtgcacttaatcaatacatgatcacttatacagtgcgcaacatcaaactatatctgtattttgtgataaaacctagtttatttatttttatcattctctgtatttaaatagatcacctgatcaatttaagctctatacataattcatgtgtagatgaaaatctaacaacatggctactctggcaaggaatcatacccaaaaaaatcttctaggtctttgtgatccagctggaatgtgacacacccttaatcccgctgggtagaatacagacacactcttagtacacacctttaatcttaaacaatgaagatagagttggttgtttgaatgtgacaagatcagacaaattattgaagcagaaaaaaaaaattgacctaaatgagtcnnnnnnnnnnnnnnnnnnnnnnnnnnnnnnnnnnnnnnnnnnnnnnnnnnnnnnnnnnnnnnnnnnnnnnnnnnnnnnnnnnnnnnnnnnnnnnnnnnnnnnnnnnnnnnnnnnnnnnnnnnnnnnnnnnnnnnnnnnnnnnnnnnnnnnnnnnnnnnnnnnnnnnnnnnnnngggaatattttattccccccacccctgtccaccctccaactggtccacaccccatacctcctccccaccttctgtctctacgtagatgtccatcccccttacccacccaacctgatctctaaactccttgtggcctccagcctgttgaggattaggtacatcatctctgaatgaacacagccccagcagtgttggggacctcatatcagctggtgtatgctgtctgcttgtttgtccaatgtttgagtgatcgcaggcgtcctgattaattgattctacaagattgcccttctcagcgtctttcagcgggttgcagattaagacaggacaagctgtagaatgagaaggagccagaagattaaaagagattgctagagttagttcaaggccaagcagagctattgaatcagaagttgggagaagcaagtttgaatgagtcatcttggagagaacttttgagtcctaacagctgaattgaaccagccagccagaggtcaaagtttattcagcattaagcctctaaaacaattatacctaggtaataaaagatactcttacattcatgcattcagtagttttcacacactagaaattaggtcttttaaagtttttttttttttttatgtatattttaggataaccctgtcaatgagaaattagcaccatgtatgctccatagaaatttccatttagtaaacactgttaccatatctgaaaatactaagtgtcagtaaattcatcaatgcagtataaggtaaaatccgttaatgttctttgttgtaggtggtttttagaccccattgatatcgctgcctgaattaataactatacaatagctagaaagatgatgttttaaattgtgatttcattcttctatatttgttggtgaatactattttaaagataattctcatcagcttgcatgtcttaataacttcagaaatcaattcaagtacagtcagtaaggaatctttattttttcttttacaattttaatgcagtgttcagtgcagatagggaatatcttggctttgtattaaacacatttgaacacaagtgtgtagatatgtatttatttagtggtgttttgattatgtacagtaactttgtaggggtgggttagaaaataaaagaaagttataaaataagactgtgtatctaaactgtgtcagtcatttttaaattacttgtagtattttaactattcaacaatattaatttctatcacagcttttgaaatttctgtgtttaaatgacctctaatgacaaaaccataaacaattaaataaaatttgcgtaataagcagctgctaacctttatttgagtcatgacacctaaaaatgtccacagttttgctcagttcttttagttcaaaacaatcacagtacaccatgaaatgcaaccacttgctttgtgctcatttgagacatgaacttctgggactaaaaggattgtgactatgattgtgactgtacaaaatgatggatgttcatacgtgacatagcttatcgggcaagtaacccagaaccacaaataagatatcctgtgtgatgagttgtcagtcaggtgttctcagtgactaccaaagacaatatagattatattcattgctatttgttgtctgtagaacctattgctcaagacaccacagacattgaccacaggactaacctagaggttttctatctgctgggtagctttcacaatgctggaatatattttcttattttcggtgggagaaaagccatcaaaagtcttacacagacctgaatactatgactgacaataatggatcagtcacaacatcaatgccatcactactccagtgtgaagaaggaaggagctcatgaggctttacatactgtggaggtatttgccacttactatccctcgaggaagaagattcagtgtctttagtggtatgacctatgctccaatagatggtgacttacatccatgaacaaacaggcaattagaattagactcagtctgttataaaataaagaagacaacaatggtagaggacataggttgtggtataaatgcatttagtcatgtatgatattaccaaacaataaataaaagttgaaaagaataaatgttttgtgctctgtcttggatggtttggtctcttttttcaagaatgatttacaagggaccaatgatgattcttttgttagttttaggggaaaccttccactccaccagtatacagtcttactgggaatgaagtttttctttcccctttgcatacaggacaatgtatttttttttaataatagccattctcactcacatacagtgagaaggactctcaatgtactattgatttgcatgttcctgatgattaagggagtggtgtgtacaagaatataagtggggaagagaaaacatgcaaaaattgtgcattcgttctcaagtgcaggaatattatatatgtatgaagaatttggactacttgcattagagcagagtggcagcaggatccaaaaggaaatggacagtcagatgaataaacaaggatatacctatggagaaatggcataaatgaacacattcatttgtgttctaagtaaaaatatgaactacaccaaaaataacaaaaagacaaaaggcaccacaggaacaagatggatttgtatgtatgaatttaccacatttgaaccaagagttacctctaaactgcactcccattaacttgagaaagaataatttctattggtctttagggtcacttcacatgatcaagtattttttgtttgtttgtttgtttgtttgtttgttttgttttgttttgttttgagagagggtttctctgtatagccctggctgtcccgaaacttactttgtagacattgagattcttttaacaagtgctacacagcagggttattgtagagcatgaatgaatttacacatgaatctttctactgaaacctctcttggtagattggacttcgaatgaagtaaaagcattcttttactcatttaataatagaataactgatataatttagataaataaaagtattgtttactttgtacttatttacatctaagctgactgagactgctcccatgtttacaagaattctccacaactttttctatactctgtccagtggtatagcaaagctactatcctgatgtcctcaattcctcattaatgagaatgggagagtcctgtctctagtctactagacaaagtcattgcacatcatgcaggtatcccaaaaacagggtaattctgagaacaggaaaaacctcgaggaatttcaacttaagagaaaatcaataagggctttggagaacaagtacttaaaaggtgtcgtgtacaggatagaggctaaaaatatttgttgagtgactaagtagttgaatggcatctactcggcccaagtagattcagcctttttttttttccattttttattaggtatttagctcatttacatttccaatgctatactaaaagtcccccatacccacccacccccactcccctacccacccactccccctttttggccctggcgttcccctgtactggggcatacaaagtttacgtgtccaatgggcctctctttccagtgatggccgattaggccatcttttgttacatatgcagctagagtcaagagatccggggtactggttagttcataatgttgttccacctatagggttgcagatccctttagctccttgggttctttctctagctcctccattgggagccctgtgatccatccattagctgactgtgagcatccacttctgtgtttgctagaccccggcatagtctcacaagagacagctacatctgggtccttttgctaaacacatgaaactcaagaagaatgaagactgaagtgtagacactatgcccctccttagaattgggaacaaaacacccatggaaggagttacagagacaaagtttggagctgagatgaaaggatggaccatgtagagactgccatatccagggatccaccccataatcaacatccaaacgctgacaccattgcataccctagcaagattttattgaaaagattcagccttttaacattatttacttctagagaatgactcgggttttaagaagtgcttttccactatttctcagtctttttcttttcttttcttttcttttcttttcttttcttttcttttgtctcaaataattttggagaagctagagagattgtgaatgatgctgtacatctggaattgaggttgaatgaaacttgtgtttagcattgaaatatagctctaagattacaatggaattcacagtataaagaaacaaatagagtaaagtcctctcaggtttgtcttacatgtaagccacagaatctatgcttttgatcttcagccattgaaagttatacattgctcacttgatatggcctgtgctgatgtactgactttgtttgccacatgcatcttttaagttagttcttgcatctggcttcctgtccaacccagattttctttctttagaagaactttagtaatccccaacatcagtattcatatttgagcttaagtaaaggctaagcactacttttaagctcagtaattcaattggctgctactcaacagttcatttttgcatgcatattgttttacttgagatctaaatgtaagtcagaacataaaatgtagcagttatcttttatgtatatattcatttatttgtatatttgctttaagacaattgtttatgaagcctaatataagagaactgcaaactgagcagtaagtagaatacatttgcagtatggtgatgtatattaatgagttttttaaactaagaaatttaaaatcaactgtgccaatatttagatgattttcgtgacattattttgtcatataaattttctgcatatatgatatcaatgatagattttaataagcaacaaatctataaaaatcgcaacctagaacttagtatgctcaatggtatataagccaatgcatggtaataactattgctaacacaatcctcattacctcatatttagaaaaatacttttatcaagtctattatgttgtattagtttgaaggtttagcctagaatctagcacatccaaatttcttcaggaaatctatctttttaaattgtttttcttattttatttgtttacatttctaatgttgcccccgcttccagtctgtcctccatgaacccaccccacccatgcccctctcctttgcctctaagagggtgctctggaaatttatctaatacaacacaaagctttgtgtttaaagaagtcttcatagatttctatactatgtaaaccaagcaatatttttttttagatctttgaacttaacaaatgtgataaaatgtgaattaaattatgaactataaattaggtgcaaattgaatttacttttacaagatcagtttcttcattttttttccgagtacaagtttttgatagatgttcaccaggcctctgaaatacaggaaccaattaataaaggctttgaactaagaggctcttttataccactttcttggtctcattgggaattcacagaaaaatatgacatcttcctatcttaaccgaatttcatcttattagtgagacaaaaagcagaataaacagaatggaaaaaattgcctgtcttggtagcaaatgcttgtattatattgaggctatgcatattctcttaaaacctaggtgaaataaaaacaaactgtcaagcagggcttggggctttgggatgagtatagcaggacagacatcatctatactgtcaattaaagaggctctcactagacagagaaagagaaaagaagacacaagaaggaacagaataacatgcgggagagcaaaggattgaacaaaaggtgaggcggggtgaggtggactacatataaggatagagggtagaatgagaaactaaagctaaatgtacaacccttgaaatcttgcttaatgcatctggtctctaccccaccgtcataaggggtgaggacctcaccttcaggacttaattgacaccttttctcttgacatctttcctaatatcctaaccctcttttattctaattatgccaaacattaggcaatgcagggcaattatctgatcaatcttttgggagctattaaaagatttcccaggatatcagcttgcttaaatcctacttttctcagccatcactcctggatgctgtatgattcctaactaaagcccactagactatccactgaatcactgcccttgtaaatcaaatcttagtttaaggaagctattcctaatctgtacttattgattgtattgcatgcttggatagaaatcatgtagtctgtaaatctgaatatatttgatacctggattttacagaaaaatattgttgacccaatatgcaaattaaaatttagagacaaaaaacaaaagtgaggaattactaaatcattttatatatttattacacacacattgcatattttgttaccaacatgaaatgatatgagaatgtagacatctaagtggcaacattttatttttaaaagtccttcatcaaaccaagatattttgctaagaacatgtgtcagccacagaatgatgtttaaagtactatatctagaacacaagggtaatttattttgagaactttttgtcccaaaatttttttctggtgaaaaaagggctgtagctgccattatacattcaaattaaccaaatttaaatgtgaaggtaattaaacaaaatgagtacaaactacagaaggagaaactgttctcaataacataaatcacagaaacagaaaacataaatttcacactttgctttggctcttttgggagaaaaaaaatatgtaacagtctgagtattgctatgacctgaaagccccaacccaataaccctgcactctttgcaagttctaaataaatagcaaagtgaaagtgtttggtatgtgttaatggtcttagaaatgagtaaaacacagtcctaaaccttagttctgttggacaccccatgttctataggaatatataatttactagactgagtgtctgaggaaaatgacatcagagcaagaagaacccattcacccatttttttcccatactagtgtgatgattataaagccaaagaatggagattcactgactctttcgccacagcaaagaaagcacaatatttactggctaaaacttttggatcaagaagtgataataatatttgtaagttagaagagtgagtctcagaaggatgacataatttttaaaggccactaaatgggtgcaatcatatgaactcaagcttttttaataaggatgtagcttgttttctgagtatgtttttataacgtttttttttttttttacttttaaagatgtaatataattcaattccttgacctggaaactgaaaataaattgcatacataattaagtatttgtatatatgttttatttctactaatgtctaagagaaattatttttcccaattataaatgtaggcaacaaaccaagagtgttatagagagcactggtgactttattttttttttaaatctattttcatgctacattagactttatgtcaatactgcaaaactgtgatttatttttatcaaaactttgaaattgttactactaacaatattagatataatttgatgttagtaacaatcacatgaaacattttcataattttagcaatataatttttattttatgtactctcatatactcatttagtttaaattaacaagagtcctatagtttccaaaggaaatagtgagagaaaaaaatatgaaaaatggtgatgtgtggctcaatgacagaacacattattagcacacacagatcctggatttagtcactaagtcaccagtaatgtcttccccatagctcacacacacacacacacacacacacacacacacacacacacacacacacacacactcacagggataaaatactcatcgaccacatcaaaatacctacccagcaagatattgttgtgtaatctgtcaccttgaaatttactgcctaaaaatgacagcaactattttcctgtatctcagcatgtttctaggtttaatcaggctcagctagatggcattatatgccccactagtgtatcactgcttccttattgtagtgtagaaagaatgcagtttcaaagtcttctccattccttgattaaacttcagctgggtatattctcatttacacatgcagttctctcttagctttttcaaaagcctactgccttttagaaagtagctcagtcggtagatgacatcatttccatcaaagttccaggcttgcttaaattcaagaggagatggtctgaactctccatataaggaatgtcaaattgtaagaacatctaggacagggtgtatttggctagcttactttggaaagaatagggaatatatattccctatggcttggggaatttttatggaattcttctttggacttgtattttcttcccttctttgtatagtattgtactcttgattgtctttcttcttaaaagtagcacttttaaaacaaactgtttagctaaattttatttcaggatgacatgatactctctcattcccccgtttcctcctcaatccaattttggggaattctacgcagtattatctgaatctccctgtgattaacaacttacatatttactttctctttgagcagagtttgtgtgtgctgctatttaacttcaaccctactcatgggtttatttacttctttttttgcatcacttatatatgagcccctttatgtaccgtgagctcccaagggcatacttaacaatttctcccctttatctcacaggactagtcacacattaatgctcaagtaatatttatgaaggattgttctttcaaattcatttttctgctgtcagtcagagtcagccacccactttccataaattaactgattctgtgttatgggtaagtgttacaacatactttgaaaaatattctgaacatggtgacctggttatgtgtatagctaaataactggactggcagagttggacagtgtagtacaaaagtggatcctgtcaaaatagaagataacagaaataaagaaaagaaaatgaaataggttgcataattgcattggcagattgaggtcccagcaagtgaaaaggttttacagttacttacgagattcttatcttctgtcaaattgcaaattcaaattttccaatggttgaggttttttgaatttgtcaaaataccttttcagttggaaggtgattttccagtgatcatgacagtagactcacagagcataagcgcagaggatacaattttccaaggcagtatacaaaaatagtattgagaggaactaaagtgatagtgtcatcattgatgctacacttctaaaggtgtgtctcatgggttatccacagccatggcactaaatgtcaatattcactgtgctgaacggcttgagactcacagcacatgtggtagtgcaacaactttcatttactatgtctttccttgcataaatgaaacatgaactcaaggagacagttctagctcaacatatgcaaataattcttacaagcctcttggtgaagcatcacctctgcctcaaaatcaaggtcagatggaacatccaatgctgcagcacagaaccactgagaacactacatccaacactactaccaaatgctcaggtgtttggacaaagtaagtgaaataccagaattcctattgcatggttgtccaagtgacccactaggagagacaaaaacattctcaggacgtgcatttcaaattgccatgacccatcaagaattaaccttggcaagacttaaatacattgctgtagaaacatatctgattttttggaactcatctaaaattagaaactgtcaatttgatcaattatttatgtgacttttattcttaaaaacaggtcagctggctcacaagaatgacaaattttccatacaattaaagagctaataggatttatttggcttcttagtgagaaccaaagatgaacctttgtcactagagaattcctatagctttaagctgctttgaaaattcttttttttctttctttctgccctttgtgtaattcttacagtattatgcttgtttctgtcagagtcctatgtagcccagggtggtcctttaattcattttattttattttattttattttattttattttattttattttattttattttatttttatcgagttccactgatactgggcggattggcaacacaccttcctggtgatacagaggccatcactctccttcctggtgagaaaggtattttcacaacctagacagagattgtgctttggagagatatatttgactcaaactcaccgtaagtgttttacaaacagattgtccatgacatgtacatatgcttcactattccccaagaaacaatgccaattctgtctgccaatagcagatcatgctatttaaagtaactgcaagagaggctgctggcaagatgtctcagcaggtaaaggcacttgtttccaagcctgccagggacctgagtctgatcccaggttctgcaaagtaagagtagagagctgaccccttgcaagttgctcttatgtctccagatgcatgttgtgagcatgcaaatatatcccctttctttcatcctgtgttttgcttcattatttgtgactttttgtttttttattttagcatcttgagtcagcaggaatttgggatccaaaacgaccacttttataagtgctaatcaaatactgttgtttctattgtcgtttattagaggagaaagtgtagtaactgcttaaatagaggttttgatctaatgtacacatattttgaataaatattttcatactatcaatgattattagtatatttcttcattatttacttggatttttgtgaactaacatataaatttatatacattctgttcattggtaataagcaatctatgctgttttagcttataatgtcagtagcagatatttaaactactaccttttctagaaataacatttaaaatgatttgatacatatttagtgaatgaattaactctaagagtaacctctgcccttttttaaattcccatagcttcatcttcttagaatctttgagagtaactggcccatttcctgccagcctctactagcaacagaccaatatatatctagtgttttacaagtaaaatccagtgtccttttgaaacccccatattggtttctcaaaataaaattaactataaatatgtttttattcattttcttcaattacagttgaggaagcaatattaccttatgagttgggcttccttacattttctagaaccctgttcctcgtagcacctttcagggtactgatcactcttggtctcagggtgtaggaaggaacaaattcccatacaagttcttactgaagccagtgtattctgcaacacagagtaatttttctgcatctgaagatgtctcgtaaaagctttcctttggtagcacagcaattttagatacagaagtatggaatatatttccaactattgttatatgtttatataaagcacattttttactgctacagttattagtcacattatctactgagtgatctcagcaacacaagacttttgaaatatcttgattttattcacatcaccattaatgtcctatgagttaacattcatgtgaagccttgtcatttatagtgagggctgttgagtggtagaaacatattgattaacacaccacattcacaaagtaatattattattacttttacttgtttcatgaagtaaatctggaaactataattacatggaggaagcagctttctaaggaaagtctagtgaatcaaaccacagtctttatgagtctgaacacaagaatatctaaagtgccatttgcttcttgatgcaacagtgtcctgagagttgtaataaggtatttctcacctcactcacattaactctacaaagtattacaggaaatattttagcgatttaacaataaaattttgatataacatttggaattgcaattttattttaatgtacagaaaaaaaaaacactgtttaaaatgttgtgattctctcaatataagaagtgtaaggaaaccagaataaaatatttaatctcaatatgtctagtttcccctggcacacagttgacttctcttgtgatgggcataggcttaccttacattcaccccctgtattctcactggtcagagcctcatgagcatctctctacacactcaggctttaataaaaaaatcaatgttagcccagcatgaggcaagcctagcaaattatcatggaccaactctaccagaatttcaaaaccttccttaaatcttccttgagagattgaaaagcgaatgtgcatttcatgagcaagctgaactttcttggaaatgcaggggcccatgtggatttctatgaaccctttcccttgtaggtagctagactggcatcttctaatgattacgttaaaaaaaaagtctcagacagcagaggagagaggtgggtgtggtcacaggtgcaaacctatgaaagactggcttctaatcctgctttcagatatgcagatcagaatacccatcactttggattacccactaatgtaattctagctgttgtcctttgcatcttgccaccatattaattctgatagaaagagctgcataagccttaacccctgaaaaggtgccttctcaatgtggtgttacaaagcactttgagtgtagtaaaggagaaaatacacaaagcacaccacattactctggagaagcctttttttttaaataatttttgccttctacattaatatctaccattttaaccactaataaggatgttgcacatgacttttaagttatagggacagtgatcatgatgcttatatattaacatactaaaattgttagctcattctattaaaaaaactgcttgttttcccgagcataaggaactgagatcagttccctaacacccatggagaatgttaaacatggcagtatgcatctatatcgacgagcactgtggtgttaataacaagagcacatctggggcttcatggctggctacctcagcagaaatgtcaagttatatgtttagtaagagaattctttctaaagaaaaatagagaaaggtaaccaaagttgacctcttgtctatacacatacatacaaacacacacacacacacacacacacacacacacacacacacacacacacacaaagagagagagagagagagagagagagagagagagagagagagagagagagagagagagagagagagtctcatatatgagattaagttccaaacacaggaaccctaatcctaaacctgtgagtacacaggcatttccactggcctgatcatcatcacaggaatctagcaattgttgacatcatcatctgccccaggtgtgccatgtgtgtgctgtaaataaaaaaccctccagatctctttcaccctggttcttcttctctgtttgtgttctccaccctccccctgctcccaagtttccctgtttgcctggggacttctttggcctcatttcctgagaccagtgaattgcccaaaagctgtccccaataaacctgcttctatatttttatatttttccttcctcttgaattggcttattttgttggtggagcaaactgaaaacctgttatatataaataagtacatgcatatatatgcatcacacagagacaaacaaagacatagacacacacacacacagagaagaagaagaaggagagagagagagagagaatattacttgttttctcattttaaagttcatagtcagagggttatctttgtcaatatttttattgctgtgaagagtcaccatgagaatggctattattataaaggaagacatctccttgaaactggtttacactttagatatacagtccactgtcatcatggaaggcaacatagccataaagagatgtagctgagagctctgatctgggtcagcaggcaagagtaagaaagggagacactgggcctgacttgatcatttgaaaccccaaatcacactcccagtgacatacttcctccaacaaggccacacctactccaacaaggccatatgtcctaatttttgttaaatatcgccacaccctaacaaccaatcattcaaatctatgagcctatgtaggccattttcattcagaccatcatagaccctattataaagagtgtagatttgggaattagttcctgaaaggatatgatttattagacagcgctttagagctaaggaaaactacgaatggcttagttccttactttctaacttgcaattccctgttcatgtgtttcctacattgaatacatgtagaatgtcacagttgagatgagtattctttactcaatatttatagcaagcccaacacaggattctgttggtcctcaaacaggttatgaggtcctcaagctcagctttcttactgtcgacctaaagagatatgtgaaagaagggagtaaacagaaatgtaaactttggataggaaagaatacctcacagatagggcaccttgtctactatgtgaggcgatatccacagggtagatattctagtagtagaatttttcatgttcagatagaggaaggtgatgtgagagaaaggaagaagaaaaagaaagagaagttgagtcaatatatatggaaagaaacaaaactccatttcacaagattacatgatcaaatgttaatggactgaatttttgaagggaatggggctgccattgctgaactccttatgtgactgccattgtatcatgtttttcagggcatactaatcttaattattcttacccattcaagtcagacatcacagtgaagtcaaggttctcagagatgagataacaaatcctgattgaatttgtacatcttgactgtcctgcacagctgataacaacttttcatttcactaaacatttgaccagggtactgaatagttatcttctagtctgcaatgttgatgacgatcatagcagcatgactagtagactcaattgtgatgagtaaggtcacagagtcttaattacataataattgaaattgtgtataatttttgtgaacatctgtacccagagacaccattaacatttaatacttgatccccgtttgacattttctactttccagactttttgaggttttaaaaaggaaatatttcttttctgaattgtttttttctgggttttttttttctctctcttagaagaaagaaagtaaactggattattatttatataaaaatcgtgaaagaaagtaagaaaagataaagatcattttttattatttccttccttttctttttccttccttccttccttcttccttccttccttccttccttccttccttccttccttctttccttccatctttccttctatcctttctgcctccctttcttccttccttccaatttttaaaggagaattttcattggttttatatcagagactttgtgctgcttatgtattgataaattcattctatcaaaagttcagaccatatctaaccattcaaactggtaggattcaattgtagtgtttgcctcttatgcttttatttgtttgttacttctatagcacaagtaacttaatagaataaaatatcttcatgtcatctcttccaaaattgaaaaaaaatctatatttaacaccctttacatagttttcatgctctttgtttcactcttctgtaaaagggattcttttcttaatcatgtccttcctattaagcctaggagttgctctctttagttttcttttcacatttcaaattagcttttatttgtatttgattttttttatatatataaaaacattcacattcatcagaagctaaagttctgtgtccatatttctggtgttctttaagtttcattaaattgacatgggacactggatatcttctccataatccactgatgagattgctaagaatggtttgttactattgtttgattatttctgcaggttcaaaagttgggccaggtagtcatttacactttgatacatcagggttttccttgtggagacgatttttttttcactgaaattttttacatacatatgtgaggaaaatcttcttaacaaaagtagagcgttgaacatgaactaataaaagagaatctatgaatatccttaattcaggcagagcagatattctttatctcattttccagtgataagtatttaattgccctttatcttgtattattaggaagctgtagtcatgtgtgcacttagttgaaaagagtcccttacaccattaaacatgtttgccttggcacaaggcatcaagggagtttcttgtcaccgagttctaagacagcatcctgaattagctgtttccagtttttgaaaatgtcatgacagttgtccaccttaggggttgcctctctcaaaatgtttacaaaatcctgtatggcatccttggcaagcagaccacttgtagaagtgagttagtctgtgctttgttattgggctgatgagccgtgggcaaaaggttacacaagacaggacaatgcaattgaagttgaaggaaacaattaactttgcttttttttcgtgctgtttaaacaaataatgatatctcctgcttccctgtgctatagtgatgactctccctgcttccctctcataatctgttgaaatcagcaaatggtgatcctaattaatatgtgtcctgatgaaagactgaaaaacaagaatggcccaatctcataaaaaacaaaacaaaacaaaacaaaacaagcaaacaaacaaacaaaaaaacctgtgttccatggccaaattaaaaattcctcctttgcgtgaatctgaactgctatttaataagctatttagttagcaacctgttacatgtttgtgtttcaagaaccctccaaatgtttcttgagtcgttttcctcatattgcttttgatactcagagcatgaaactggatttttggtggggggccaggctctcctgtgaggtctttgcattcccagaccctgtatagcaagaaatgttctaatgcatggaggagaaaacagttttatcctttgcatgtaattgctatgcatatttaaagccagttattggactgatgctatgctataaaggttaaaaattgcagtaatcatacattattaaaaataaggatatgatgtttgaatttattaggaaaattaacttaattcccttttttatgataacttcttgcacaagggactcagactcatacaagctgcagtgttacatgtaagtttggcttcttgcatttgtgaaatccacttgctaggaccaggaagcaggagtgggtgggttggtgagaagggggagaggggagagaatagggggttttcagaggggaaactaggaaaggggatgataacatttgaaatgcaaataaagaaaatatctaataaaaatgctaaaaagattaaaaacttatctttttgaagcatagtaatctttaaatttcacactggtttgttttatacacacacacacacacacacacacacacacacacacacacacacacacatatatatatatatatctacttccaccatgtatgttctttggggtcaaactcaattgccatcctaagcagcaattagtattatctactgaactatcttcactccctaaacatttacatttactttttttgttttgtttgtttgtttgtttgttttgtttttgttttttcaagacagggtttctctgtatagccctggctgtcctggaactcactttgtagaccaggctggcctcgaactcaaaaatctgcctgcctctgcctcccaagtgctgggattaaaggtgtgtgcaactacacttggcaacatttacattttttttaataaagtttgcttgtccaatgggcctctcattccagtgatggccgactaggccatcttgttttttttcctctttttttttaattaggtattttcctcatttacatttccaatgctatcccaaaagtcccccatacacacccccaatcgcctacccacccactccccctttttggccctggcattcccctgtactggggcatataaaatttgcaagtccaaagggcctctctttccagtgatggctgactaggccatcttttgatacatatgcagctagagacaagagcttcggcgtactggttagttcatattgttgttccacctatagggttgcagttccctttagctccttgggtaatttctctagctcctccattgggggccgtgtgacccatccaatagctgactgtgagcatccacttctgtgtttgttaggccccggcatagtctcacaagagacagctatatctgggtcctttcagcataatcttgctagtgtatgcaatggtgtcagcgtttggaagctgattatgggatggatccctggatatggcaatcactagatggtccatcttttcgtcacagctccaaattttgtctctgtaactccttccattagtgttttgttcccatttctaagaaggggcaaagtgtccacactttggtcttcgttcttcttgagtttcatgtgttttgcaaattgtatcttatatcttgggtatcctaagtttctgggctaatatccactgatcagtgagtacatattgtgcgcgttcctttgtgattgggttacctcactcaggatgatgccctccaggtccatccatttgcttagaaatttcataaactcattctttttaatagctgagtagtactccattgtgtaaatgtaccacatttttttgtatccattcctctgttgagggacatctggtttctttccagcttctgactattataaataaggctgatatgaacatagtggagcatgtgtccttcttaatggttgggacatcttctggctatatgcccagaagaggtattgcaggatcctccggtagtactatgtccaattttctgaggaaccgccagactgatttccagagtggttgtacaagcttgcaatcccaccatcagggaaagaagtgaattcaaaagtaacaaagccaactcaaaacttctttatacccttatttgttcctttttggttttgtttttcattacagtaaagctaatatggtaataactttagatcttatgatggacaaagagttttaactctatcttcagttttatttagtagcttctctcgttggttgagcatcacgctgagatgctgaccaagttctgaactttcctgtctgtattcctgctcatattcccagactgtccatgaatgttatttgtaatacagtttccctgaccccaccccctgaccagtggaggaaaaactgaaatttgaagattgcataatactaagttcaattataaaatttatacattgcatttctgttcttaaaaagattatatgttttaaaattatctgtgtctttggttcagattcttccctgggacataatgttttgacattgtgtacactgagctgtataacataacttcatttctttttctcaaaaaacaaaaaacaaaaacaaaaaatgaaaataaaaaaaaaacaaaaacaaaaatcgccatagtttgtatatctcacaattgttcgtacctcactgaaatgcattggggttgtttctgctttcaaaattagtgtagacagtcttttccttactcctttcctttcttctttcatccctatctcctgtcttcctatttgattttatttttaaattataatttctgcaatatacatctaggagaataattactcctaacatggtaattctacacataaatctttggatactcccagaatttcatttgtaacctttggtttgattttattttgcaaatggttctcataattcatttacattatcttcatgagtgtaattttaccaaacatccataaagtagcaaagtggccatcatttactgatgttccatgcaagatacagaatcagcaacactaagtgctttgctgtcgttggtttcctattttccttacaagagctctgtgcatcaaccattttagtatctctaattttcagataaggggactgagcttagaaacgaaactttcagtgacccaagcttctgagctgttcagttgcaagtcaagtgcagaagtgtgaccagaggacccatgtaaaatctcttttgcctccagctctctaccctccaaatctctagtatttaatacaaaaagaattcaaaagttattttaacagtatgaagatagtttcacacattctttggagacaggagcctcattgacacctgtttttccattcctcctcatttataccctttgatttatttgtggaatcaaactatttgataatattaattcataattcacaggtccattacacccaaagttttttgttttgttttgttttgttttgttttgttttgttttgttttgctttgctttgctttgttttgttttagtttttcaaggcagggtttctctgtatagccctggctctactggaactcactctgtagaccaggcttgtctgtaactcagaagttcacttgcctctgcctcccaagttctgggattaaaggcatgcgacaccactgccctgctcaaagttttaaaataactttccaatggaaatggatgtaagccattaataatgtctgacattattatccatgtgtcagaacaggattttttctggtcactattaggactgtgattttaatctcttgaaacactttggcattatagtacaaaatatatgcccagttctactattatataattgattcaagtaaaaagaacaggattacttgagtaggttaagacaaaaatcatatcaattccaataataacctacttctcctttctcctattacctgttgtatgttggcttttacaggatcacatgtttcacataattatctactgtcaatgataatgtataaccaagtgatagccagaaagtatgtactaatcatacaggaacattggaaatgtagctatttacctgaggaattaaaactttgttttgtttaactttgattaacttaatttaatttaaataaccacaatcaggtagaaaccaaacaatgaaaaatctggtattgctttttctttaactctcttaaggtttgtttgttttttaactggttacacatcaattagctattcatacacttgaaataaaatcttcctttgaatttagagattattgtcataatacaattttcacttgaacagtgatccaaaacaagttttttgttgttgttgttttttgtttttttgtttttttttttgttttttgttttgttttgttttttttgtttttttttttgtttttgttttttgtttttgttttttagcaatagggaacataaaagtttattctatgaccaaaacttcaatattcatgctagacaattaccactccctaaatctacattctggggcaaaatgaatactaaatgcttggtctcagctatggctaatttggaacctgttctctgtactctgagcagtgctggggaaagatggcagatttatcctgatgacaaaccaacttgactgtttcaagatgaagtgattttattagaatcgtccgaatcaattacaaagaactatttatgttttttttttgtttactctcacaagtgaaggcaaaagcaagagaaaaaactcaaatgtcattgccaagaatactccattttatgcattttaattccttatgaaacatatgttgctccaaaacataacataaaaattatccgtaaagaaaattaatataaaaatatagagatgtttgaagcgatgtatgtcaactataaaaccaagaataagatgcagtaaagcattatattttaaaacaaaatttaaaaatatggtttgaaagtttcacacatacacacacaattttttacttcatcaatctctcacccatctctgtttccccattaaatccttcctttatggtgagtctcccacctaattttacatatttttttttgtttttctggtgtactgaatttaataagaggttttgtcttttcctttatatgtaaaagagtatatttactgaagcaatgttagtttatctgttactatactgttgaataaaatgatactctttattctaacaaccattattttccaataatccctactggataggctaggatctcatgttcaccttctcagtccacaataaaaggttgatgggtccagtcttctgtacctttcaggcagatacacacctattgtgaactcttgagagcaggggtcacgtccaatctagaagatatattttgactccctatctccccaatctgagtgtctttctttcattctgtcacatcttatgcaacattccaagggcctcattgtattgttctttttcttagacaagtgtgttctgctgttatatttacaaagagtgcacattttaagaaacatacattcactgttgtagtttaatagtgcagggagttgctctattagcaggtatggccttgttggaggaattatatcactgtggggtgggctttgagaccctgctcctagccacatgggagacagtcttctgtttgtctttggaacaagatgtaggaccctcaactcctctagtgccatgctaatctggactctaccatacttcctagcttgatggtaattgaactgctgaccctgtaagccagcttcttttaaatgttgtccattttaatagttgccttggtgtggtacattttcacaatggagtactactcagctattaaaaataatgaatttatgaaattcttggacagatggatgtgtctggaggatatcatgctgagtgaggtaacccaatcacaaaagaagtcacttgatatgcactcattgataagtggatattagccccgaatcttagaatacccaagatacaatttgcaaaacacaagaaaatcaagaagaaggaagaccaacgggtggatacttcattcctccttagaataaggaaaaaaatacccatggaaggagttacagagacaacattgggagctaagacaaaaggatggaccatccagagactaacccacccagggatccatcccataatcagtcaccaaacacagacactattgcatatgccagcaagattttgctgaaaggactctgatatagctgtcttgtgtgaggctatgccagtggtggtaaatacagaagtggatgttagcagtcatctataagatggaatacagggcccccaatgaggagctagagaaaatacccaaaatgctgaagagatctgtaactctatagttagaacaacaatatgaactaaccagcacccccagagctcatgtctctagctgcatatgtagcagaagatggcctagtcagccatcattgggaagagaggccccttggtcttgctaactttatatgctccacccagtacaggggaacatcagggccaagaagtgggagtgtgtgggtagggaagcagggggggagtatagggatagcatttgaaatgtaaataaaggatagcattttaaatgtaaataaataaaatatctaattaaaaaaagagagaaaaaaatagttgccttggacatggtgtctcctcacagcaatggaaaccctaactaagacactcacccaacattttaaaacttcttcatattgctgtaaataatgctttcagatatactaccacataaacatattaatcaaattaatattcgttcaagtctttatacatttaaactgtttcagattccgaagtattctctggactttataggtcttcccagaatttgaagaaaccacaaactatcatttctctttagctgaacttttattatagaggacatggtgactccctacagttttagagttgacatttaagtttatgatagagataagaaaaccattagtgtttaccagataaagaaacagcaaaataatataagtaatatatctttattttcatatatctatacttacaaagaggaatgccagaactaagtgaacaatataaaaataaaatttccattgattaatgccattaaaagtacacaaatactaaacctatcatgaattttactattttcatctgtgaagtcgggggcagaattgcctgtgtgtctatgtgtgtgtgtgggggggtatatatttgtttttgtgcatgtgtgttacaagtctttcaatcaaatttgaaagcctgtggaagctcaggctcagtgtcacaacccagcaactaattataaaatacttgatgaaaactgtgatctgccatgtgtttcttcataggcattacttgccagaatataaaaagtaataaataataaactaatactctatagatacttaaacctttactattctctctctgtgtgatattgtaaaagaattataaaacacacaccagggcacagttccacttatgcctgcatgagtgtgccaagccctagtaactgatgccatggcttgtggatggtgaaatgattaaggtgttgtgaggattttgcatcatctgaacagttagctgttgccaaagtgaagagatagctggttcatgttttataatgggaaattgttgtgtcgagcttcaagggtcagtgtttattatgacttttttcagtccccaaatggttctattctctagatgtctgaaatatgcaatctgaaatccttaatataattgaatctaattttatgaaaacaaaaacaaaaggaaaggaaaaaagaaggagtaggaggaagaggaggaggaggaggaggaggtgttgtgaagctgaacacactccggatcttaactgtgccctctggggaaaggaaagtcgaaagaatgaatattagtcctaataaggaaacatttcattgcactctttcattctagtaaaaatcatctcagtggagagataaaagcacatttactatatttgccagaatggagatgtgattgtcggaagtcgggttattttatatttcattttgcactaatctctttttttgatatctgagcacaaggaaacaaaagacatacttctttcataatacagttggaggacatggaaaatggactttatttccagacattttctattatgagcatcattctgacaatcattttaaacagagaaatggaagtgtcagctattaaaaagacattaactcccaaattacaatgacaacattaactttagttagtatatctacaggggaaatgactttctaaatatttatctaagcatgcatctcttttatattcagtcaattcagctcttgtcttcaattgtgaaattaatctgtaattgttattatcaggactaataaagtcataggagttattccagataaaagagaaacacagacaccatacaaagttcatctgtccttgtttgttcctttcattagctagatctatgtttaatcattcaactgaacaaaaattatataacttttcacaagctggccaaatatagtaacaaagataaaatgtgtacaaagtggacataccttttataaaagtgtattaaaagtaattgttcttaaatatccataggaaataaaaatgaaaatggactataaggatactgtatctattattttatacaacatatatttatatataatatgtacacacacacatatgtatacacacatgattttatatctatatagatagatagatagatatatagatatgagttgattacatattacaataatagtactatttattatctgggtcagttgggaacatctgaagtcagtgacttaatccctttgaaaactattaaagatttctgcaaagtatctgtcattccttttccgagtgtggaactttctatgtgttcagtaagagagagaaaataaacttttgttaaggtcagttacatgcagaaaaacctagacacagacacagcaccagttaagtagagagctttcaggcagacacagactcacactaatacaacagacaaagagaggagagaaaacacaagagagtgaagcagaggatttaaatttggtctttttcttggttaattgacaccgaagggaagtgctttgatttcattatttaatgtaacaccagtgcatcatcaataactcagacattaccagtgtttgaactggcaacatttccttatcaggaaactgaagataaacattgaaatgacttcaaagttcaaatgtttcttagattcataagaataaataaagaaaagaaaacagaaacaaacaaagtgaaaagagttgtcatctggaacaacagttcagtggataaagttcttgtcaaacctacaacctaagtttctatttccataaccatgacacagccatcgtggcataaaacactactgcagggatgtgcagaaaggataggtagatcccagaaatgactgatcagtccatctacctgcaatgctgatctgcaggatcaaggccagactccatctcaaaaatgtaaggcagattttaacagtattaatgttgcttttatgaacttggttgccattgtgtttggtgcatagattttaaagattgcaatatattcttgttggatgcttctattgatgactaggtagtatcttctgattatttttggttttctgtctgctttatcagatattaaaatacctatgccttgtttcttgtgtccattttcatggaatatcttgtttttttatggaatatctttttccatatttttaccgtgagttgacatctgtccttgatgttaatgtgtattccttggagtcagaagcatggatcctgttttctaacccaatatgttattttgtggggtctttagggggcaggaaagagggtaaactctctctctctctgtctctttatctctctctctctctctctctctctctctctctctctctctctctctctctctctgtgtgtgtgtgtgtgcgtgtgtgtgtgtgtgtgtgtgtgtgagtgagtggtgtaaacacacactcatgtgaaagcagatggcttcagagatcagtagagggcagtgctctggtgtgaaacttatgcatggttagcagttcagtcttccttaagagaaaaaaaacaaacaaacaaacaaaaaaaacctcctaatcctaacctctaagtagtctatgagatgaaataatcttaatcatttacccctataagatctgtgaatttctgtatgcagtaagctaaacagattttcacagaaaagtgttatcatgggaagtgtgtctatttagctccctaccttttgttcaattccactcatatgtcctaaactgggttaatgtaatatctttaacttttattttacaatggcagctgactcacatctatgtcccaatatagcctttgtttactacatattttcagtgtttattcttctgatgtttgttaagagtataagctgatataatgaactaagtctacttgacttctgaatgctattcgtcatttaattcattcatggccctgaggctgttcacaatttaaaacaattcaggagtcaacccaaaagatcctttcatttgtctttgcttcctttgatctttggagtgccctgattataacactaaatctttgggggttggcgggagtatggttaaaccaagtttccttcctgattgatccccttttcttgatcgtcaaagaatatggtaattgctcaatttatttctaaaccaatgatagaaaatcttgacacataaacagctcatatttttcacacttagatgagatttcattagtttaccacatcactaattcactgcaatgcaaacacaatcttaagagttcttctcacctcagccttttagataatcaccaatgaatcatcataggttaccacagatatttattgtagtagtagtactagtagtagtagtagtggtagaagttgtagtcgtagtcgtagtagtagagtgtgtgtgtgtgttacttaaggccagtaaatgcatccaagcatgcacattttcttttcccctttgaattaaacatacctttgacacctacttcagttctactgaatctatcttgcaaacggttttaaaattaagcaagtgggccaatatgattttaaatttcaggaaactattttctaatatggaattgatcttgacgaatgactgaagcagcatcaaactttatagaaaggcacttgaaagaattactctattctgtgtcctcagtggttatcacaaagaaacatagtatatttctatccttcatgtattagctaatgtacagtcttgtttaaaattcatcatcacatctaagatccctatagtgaatatataaactgtatataatagaagcatatgaaccttaaccatttctaacctgccagacctgagttgttcccagttgttgccagagtatgactttactaattttgtctgaagagcctatgctaaaagtaataatgacagtcttttttattttgtccatgataccaccatcatatcaatgctatgtagcagactgtaagagttttgatctcgccattgtctataaagatgaacatgatgttgttatttttaaattagaagcttgtcccttgcttctaggtcttctatgcagatccaatctaaagcttaaaatgaaaaaacacaaagcaaaaacaaaaacaagcaaatgaacaacaaaagagtctaaaccaaaataaaaacaaaacaaacagaatgaaactatgaaatacaaaacaagcagaaacctgtggaaatttgcttaagaattattatggaattacatgattattaaaattcacttaaaaagttgttggcaaagacaagtttgaaattatataccgaaggctacaatgatggtacatgaaagaactagtcttgaattgagatctactttccttcaaaggtcaaatgggaataactgtcacaatatcaacaatcacatttccaaagacacagtgttctcacatctagcatagcctttgtaaggaccgattttgtaaataaaatttttggttatatgatttatgaaatcaaatgtttaatatattatgtatagcatatactctaaggcatcaatacattgtgtaatatttaaatcagattaaatgtatctgtttccttaagcatctgttcctctatgactcagataaatggaggagtggggagaaggaagttttagggaattctgtgttgcactagagatgagggtagaatggaaaaggaagctacagcaggaggtctgctactgagcctagtgagacttaggaactgaatttagagaaaagtcgagagaggtgaagatctgcagttaggctacctgcttccttggactagaaaacctatatacctagtgtaaaatttccccaaaatgtggggattaaagtgtgacactacatgagtgtgtgtgtgtgtgtgtgtgtgtgtgtgtgtgtgtgtgtgtgtgtgtgtgtaagccaaggaaatgtatgtaggaacaaatcccccccccccattatagtataaaataggtttgggggattgtcttagggtttctattgctatgaagaaactccatgaccatgactatgacaatggcaacacttataaaggaagacatttcattgggcctagcttatagtttcagaggtttagtccattatcatcatgacaagaagtatggtagaatgcaggcagatgtgttgctaaagaaggagctgagagttctatatcttgatctgcaagcaaaagaatgagactatgctgggcagtggtggcacacacctttaatcccagcatttgggaggcacaggcaggtggatttctgagttcgaggccagcctggtctacaaagtgagttccaggacagccagggctatacagagagaccctgtctcggaaaaaaaaaaagaaaaagaaacaaaaacaaaacaaaacaaacaaacaaacaaacaaacagaatgaaactatgtttcatactgtcacctcacagtgggcatagcttgaacatatgagtcttcaaagcccacttccacaaggactcactttcttcaacagggctacacctactccaacaagaccatatcccctagccatactagtctttatcaagaatttaagcacataagtctatggggaccattccaattcaaaccaccgcagagaacaatttcttgttgtcagacctgatgaaaaaatacccttacatgctgagatatctagctatcttccaacacataatttgaaaatgaatgttcttcacatgtctctaaagtttcttgttgttctcatgatgcaaaatttattttgtactcatctccaatatttcaaagtttaaggacctcaacagtattgaaaggtctttcttatgactcaggacttttttaaaactgagttcctctaaaattattacattgtcacattcttacaaaaaattaaagtatagagaaaatgatttgtttctttctaacaatgtggtcctagatgcatttgcacctccttgtccacaactgtaaagttgcccactgctattcttgctaatttgctcannnnnnnnnnnnnnnnnnnnnnnnnnnnnnnnnnnnnnnnnnnnnnnnnnnnnnnnnnnnnnnnnnnnnnnnnnnnnnnnnnnnnnnnnnnnnnnnnnnnnnnnnnnnnnnnnnnnnnnnnnnnnnnnnnnnnnnnnnnnnnnnnnnnnnnnnnnnnnnnnnnnnnnnnnnnnnnnnnnnnnnnnnnnnnnnnnnnnnnnnnnnnnnnnnnnnnnnnnnnnnnnnnnnnnnnnnnnnnnnnnnnnnnnnnnnnnnnnnnnnnnnnnnnnnnnnnnnnnnnnnnnnnnnnnnnnnnnnnnnnnnnnnnnnnnnnnnnnnnnnnnnnnnnnnnnnnnnnnnnnnnnnnnnnnnnnnnnnnnnnnnnnnnnnnnnnnnnnnnnnnnnnnnnnnnnnnnnnnnnnnnnnnnnnnnnnnnnnnnnnnnnnnnnnnnnnnnnnnnnnnnnnnnnnnnnnnnnnnnnnnnnnnnnnnnnnnnnnnnnnnnnnnnnnnnnnnnnnnnnnnnnnnnnnnnnnnnnnnnnnnnnnnnnnnnnnnnnnnnnnnnnnnnnnnnnnnnnnnnnnnnnnnnnnnnnnnnnnnnnnnnnnnnnnnnnnnnnnnnnnnnnnnnnnnnnnnnnnnnnnnnnnnnnnnnnnnnnnnnnnnnnnnnnnnnnnnnnnnnnnnnnnnnnnnnnnnnnnnnnnnnnnnnnnnnnnnnnnnnnnnnnnnnnnnnnnnnnnnnnnnnnnnnnnnnnnnnnnnnnnnnnnnnnnnnnnnnnnnnnnnnnnnnnnnnnnnnnnnnnnnnnnnnnnnnnnnnnnnnnnnnnnnnnnnnnnnnnnnnnnnnnnnnnnnnnnnnnnnnnnnnnnnnnnnnnnnnnnnnnnnnnnnnnnnnnnnnnnnnnnnnnnnnnnnnnnnnnnnnnnnnnnnnnnnnnnnnnnnnnnnnnnnnnnnnnnnnnnnnnnnnnnnnnnnnnnnnnnnnnnnnnnnnnnnnnnnnnnnnnnnnnnnnnnnnnnnnnnnnnnnnnnnnnnnnnnnnnnnnnnnnnnnnnnnnnnnnnnnnnnnnnnnnnnnnnnnnnnnnnnnnnnnnnnnnnnnnnnnnnnnnnnnnnnnnnnnnnnnnnnnnnnnnnnnnnnnnnnnnnnnnnnnnnnnnnnnnnnnnnnnnnnnnnnnnnnnnnnnnnnnnnnnnnnnnnnnnnnnnnnnnnnnnnnnnnnnnnnnnnnnnnnnnnnnnnnnnnnnnnnnagatatccctcatctagtgttattataccacataagtagtttttagatttcactatgggttcagaatgcccagaatgattgttaaaacaaggtgtctgtcttcctacatacaggccaccattagaccagaaccatttattaagatggtttctttattccactgtgtgtttttggtttctttgtcaaagatcaagtgtccatagatgtgtggacttacttctcagtctttgattctattccattcattgacctgtttgtctttgtaccaaaccatgtagcttttatcactatggctttgtagtacagcttcaagtcagagatggtgattttcatggaagatcttttattgttgaaaattgttttggctaacctgggtttttctttttccatatgaagttgagaattgctcatcccatgtctgtgaggaattcttgaaactatgatggagattgcattgaatctgtggattgcttttggtatgatggccattttcactatagtaatcctaccaatccattagcatggaagatctttccagcttctgaggccttgctctttgtcacatagttctttcatttacttggttataaattcatgaagatattttatactatttgtagctattgtgaatagtgtttcccctcattcctttcatagcttgttatcatttgtgtaaaggaaggctacaggtttgtttgagtttagtagatccatatttatcatcctgaaaaaaagctcaagtctaagtggtccaaggacctcaacataaaaccagtctctcaaggccataagatcaacaatcaataaatgggacctcatgaaaccaaaaagcttctctaacacaaaagacaccatcaataggacaaatcagcaacttacagattggtaaaaaaaaaaatcttagatagccctatccaacagagggttaatattcaaaataaagaaagaattcaagaacttaacttccaaataactaagtacccaattataaaatagggtacaaagctaattcataactgaataatcccgaatggccaagaagtacttaaaaaaatgttcaaagtccttagtcatcagagaaatcaaaatcaaaagaatcctgatattttcccttacaccaatgagactagctaagttcaaaattcaaatgtcagcagatggctggcgagggtatggagaaagatacatacactcctccattgttggtgtgattgcaagctagtacaaccactctggaaatcaatagagtggttcatcagaaaactggaaatagttctacctgaagacctagctataccactcttgggcatactttcaaaagattccccaccttgtggtaataagggcacgttctcctccatttttatagcagccttatttgtacagaatacttaggatacaattcatagaccattaaaagtgtagcaagtagaaagacccaagtgaggatgtttcagtgccacttacagggggaatgaaataatcatcagaggcagagggagactgagaacttggtggaagagcgaagggggaggcaaaaannnnnnnnnnnnnnnnnnnnnnnnnnnnnnnnnnnnnnnnnnnnnnnnnnnnnnnnnnnnnnnnnnnnnnnnnnnnnnnnnnnnnnnnnnnnnnnnnnnnnnnnnnnnnnnnnnnnnnnnnnnnnnnnnnnnnnnnnnnnnnnnnnnnnnnnnnnnnnnnnnnnnnnnnnnnnnnnnnnnnnnnnnnnnnnnnnnnnnnnnnnnnnnnnnnnnnnnnnnnnnnnnnnnnnnnnnnnnnnnnnnnnnnnnnnnnnnnnnnnnnnnnnnnnnnnnnnnnnnnnnnnnnnnnnnnnnnnnnnnnnnnnnnnnnnnnnnnnnnnnnnnnnnnnnnnnnnnnnnnnnnnnnnnnnnnnnnnnnnnnnnnnnnnnnnnnnnnnnnnnnnnnnnnnnnnnnnnnnnnnnnnnnnnnnnnnnnnnnnnnnnnnnnnncagctgactgagacagaagcaaatatctacaccaaacattggaatgaagtcagggacccctatggttgaattaggggaagaactgaagaagctgaagttggggaaagtgaccctataggaggaccagcagtctctattaacctttctattaacagagaccccagagagcacccacttggagtaaagctagaaggagaaatggaatgagaaactgtgggagggggcccctagaagggaagggggacaactgaaatgcaaataataaaataataaaaataaaagaaagtaaagaacaaaagaaacaaaaaacaacaaggtgtctggctccacacagccggatagaattagggaaatctaggcaggatctacaaatttgattcctaatgaatgtccacatgtctctaaattttaagagtttagagaccagtgtcacccaatccatacagaattcagtataagaaacagtgaattttctgattatcactggaatcagactcataaacggaaaaaacaaaaaacaaaaacatttccctttggcagaaaatttcaatagttctattgtgtaatatggtaagcttagctgtgaataattttatatttgaaaattgctaacagaatattttaattgttcacaacactaggtatataatgtatagtacatatattaattaggtcatttttgcctatccacaacttaatggttattccaaaatatcatgttgtcaatgataactgtgtatgaatttttcttagttgtccactaaaaatgaataaaaagtttaaactgatgctcaatataacactgaagataaaacttacaaggactttgctgttgtgagaagggaattctgtgaaatatttagcatagggactagtataagaatttctgcattggagtggcagaggtcaaaggtatataaacttttctggacagagttgtagtagtcaaaggtgaatatttatgcaaagggcttctggtcttcccacgggattgataatgcagtaatataatcaaacaatgtacttcaaccatacagtgaccctaatgactgtgaagcaatgtgactcagaaagtgatttataatgcaaacctgaacaggtacaagagacacaggctgccctcttgaaaacagcatatgtgaattgccagagaaaggaagtgtagcagacacaagcatatgccaagaagggacggtgcaggtgtcttatgtactgtgcagcagtagctgagaggctcaaatgtagctgctggagcctgaatccattctcagcagtttgccctaataagtttcatcaagtttgctttacacatgctctagcttagaagtcttagttggcatagtcttatgccaaaaaagaaacacatgtttttttcacaacttaattatctccagtgatttcattacctcccagacttgcatatttggggctacagtgaggaaatgtcacagactgggcaacttaaacagaaatttctttctcagagttctcgagaagatttcatattcaggttgcttccagatttgatttcttagaaggactttctgcgtgaatttcacatgaccgccttctgtggtctttacatttatacactcaagagcaagaaaaattgagctagacctgtagtactttttttgattgaagaaatcaatgtaattgggattagggcctttcccttttatttcaactgacctgaatcatagcacttcttttgaggaccccctctccccgcaatgcatgtacattttgattggtggctttactacaaaaattttggagaatgcggtcaacaacaaagagttaatgaaggaagtctatgaaacttaatataagatgggggctaagaaattatttaacgatcatgatcaatgtggctttgcttttttgttgtttttggttttttgttttttttttttttattttttagacacggtttctctgtgtagccttggctgttctgaaactcactctgtagaccaggctggcctcgaactcagagatacgcctgcctctgcctcccaagtgctgggattaaaggcatgtgccaccacacccagccagtgtggctttgcaatgagttatccagatattgatttagtgataaattaatatattcatgtatactaagtatgccaaaattacatgactcaagtaacatattcttaagttaatactactacttatttatgtaaggtacaatagttatttatttggaatctgtgatgtttaattctatatcttattacacttaacaatctcaagtcactttatattttgctctgtgaacctccacagagtgctcctgtgaaagttggtggggcattttaaaacctttccttagtcaccatatctaacaattaagaagaaaagttgaatgacatatggaaaataaaacgaagaaaataaatagttcaattagtctgcaaagcattgaacataattaaagaaaccttagagatattaagtaatctcagcaagatagaatttctgatatttcccctttactttcactgctcttatttgtaagctgttggatcttgaaaattagttcctttataaaattttcaaacccttttcgttttttaatgttgaacatttacagctcaagagaatagaaatttgatttcactaggaagagaaatggcaacaaatcaaaatttatttaccagttcagggaaagagaacagtgatctatcaccagatggtaaatagattagtgttacctctaatgaggtttccgatttttcaactcaatgttctttgcgaattttatgttatttgacttcccagctatttcatttattacaacaaattattaggcacaactgtaaagtctgcatttcctattcaacttttcaatgtagatttcaagatagatgaaaatcagaaatataagcaaaggagggactgttggaataaattgtgtnnnnnnnnnnnnnnnnnnnntgggaataactgtcacaatatcaacaatcacatttccaaagacacagtgttctcacatctagcatagcctttgtaaggaccgattttgtaaataaaatttttggttatatgatttatgaaatcaaatgtttaatatattatgtatagcatatactctaaggcatcaatacattgtgtaatatttaaatcagattaaatgtatctgtttccttaagcatctgttcctctatgactcagataaatggaggagtggggagaaggaagttttagggaattctgtgttgcactagagatgagggtagaatggaaaaggaagctacagcaggaggtctgctactgagcctagtgagacttaggaactgaatttagagaaaagtcgagagaggtgaagatctgcagttaggctacctgcttccttggactagaaaacctatatacctagtgtaaaatttccccaaaatgtggggattaaagtgtgccactacatgagtgtgtgtgtgtgtgtgtgtgtgtgtgtgtgtgtgtgtgtgtgtgtgtaagccaaggaaatgtatgtaggaacaaatccccccccccattatagtataaaataggtttgggggattgtcttagggtttctattgctatgaagaaactccatgaccatgaccatgacaatggcagcacttataaaggaagacatttcattgggcctagcttatagtttcagaggtttagtccattatcatcatgacaagaagtatggtagaatgcaggcagatgtgttgctaaagaaggagctgagagttctatatcttgatctgcaagcaaaagaatgagactatgctgggcagtggtggcgcacgcctttaatcccagcacttgggaggcagaggcaggtggatttctgggttcaaggccagcctggtctacaaagtgagttccaggacagccagggatatacagagaaactgtctcggaaaaaaaaaagaaaaagaaacaaaaacaaaacaaaacaaacaaacaaacaaacaaacagaatgaaactatgtttcatactgtcacctcacagtgggcatagcttgaacatatgagtcttcaaagcccacttccacaaggactcactttcttcaatagggctacacctactccaacaagaccatatcccctagccatactagtctttatcaagaatttaagcacataagtctatggggaccattccaattcaaaccaccgcagagaacaatttcttgttgtcagacctgatgaaaaaatacccttacatgctgagatatctagctatcttccaacacataatttgaaaatgaatgttcttcacatgtctctaaagtttcttgttgttctcatgatgcaaaatttattttgtactcatctccaatatttcaaagtttaaggacctcaacagtattgaaaggtctttcttatgactcaggacttttttaaaactgagttcctctaaaattattacattgtcacattcttacaaaaaattaaagtatagagaaaatgatttgtttctttctaacaatgtggtcctagatgcatttgcacctccttgtccacaactgtaaagttgcccactgctattcttgctaatttgctcatttttcatatttttctgctctctttgctgctctttcttaatatattcctagatcagtggtgtgagcagcaaccacaaaacagcctgaatattgctttagtgaacctttcttctactagacgaatttttccattacatttccattacataattcagccttactcaagttatgtacaatgtagctaggtccctcccccttatccagaatttactatgaatagcatttatcctatctagcaatagagttcttattcttctctgaaacctcatgagccaaatctctgctctctgcatttctattagcattcatatccctcgaactcttaccagaatagtctatttaactgtgttaaatatactttagagcttctctagtgcttagattcaactttccttttcagaaatttcaaaacctattaatgacatagtcaagattatgagaagagctcaattctcaacaccaatttaaaaacaaaacaaaacaaaacaaaaactattggttctatttctcataactgagccataaacttgacaaaaacaacttaaaaacttgtttatcttcactcactatgttaggctcagtctttaatacctttcgatgttggttagtaggagtatgaggttattggtcattttatatctgtagaaaggcatcagagattaatctttgtaccctactccatgtcttctttaatctccattggaagcccagtctgtgagattattttatcttatacaagttgagtattgttccaacttagaatttatatggaaaaccctcacacccaggtgtgtgacagatatgtttcttttttatttgtttgtttgatttttgattttcaagacagggtttctctgtgtagccctggctgtcctggaactcactctgtagaccaggctggcctcaaactcagaaatctgcctgcctctgcctccaaagtgctgggattaaaagcatgtactgccaccgcccagctgacaggtatattttttgcgtgagaatgttatccattcaagttgacaatgtagattaactgtaagtattgttgactggagtaacaagagatatccctcatctagtgttattataccacataagtaatttttagatttcactatgggttcagaatgcccagaatgattgttaaaacaaggtgtctgtctcctacatacaggccaccattagaccagaaccatttattaagatgatttctttattccactgtgtgtctttggtttctttgtcaaagatcaagtgtccatagatgtgtggacttacttctcagtctttgattctattccattgattgacctttttgtctttgtaccaaaaccatgtagcttttatcactatggctttgtagtacagcttcaagtcagagataatgatttccatggaagatcttttattgttgaaaattgttttggctaacctgggtttttctttttccatatgaagttgagaattactcatcccatgcctgtgaggaattcttgaaactatgatggagattgcattgaatctgtggattgcttttggtatgatgaccattttcactatagtaatcctaccaatcccttagcatgggagatctttccagcttctgaggcattgctctttttcatatagttctttcatttacttggttataaattcatgaagatattttatactatttgtagctattgtgaatagtgttttccctcattcctttcacaacttgttatcatttttgtaaaggaaggctacaggtttgtttgagttaagtagatccatatttatcatcctgaaaaaaagctcaagtctaagtgatccaaggacctcaacataaaaccaatctctcaggccataagatcaacaatcaataaataggacctcatgaaaccgaaaaaggttctctaacacaaaagacaccatcaataggacaaatcagcaacttacagattggtaaaaaaaaaaaaaatcttagatagccctatccaacagagggctaatattcaaaataaagaattcaagaagttaacttccaaaaaaataaatatgcaattaaaaaatagggtacaaagctaattcataactgaataatcccaaatggccaagaagtacttaaataaatgttcaaagtcctcagtcatcagagaaatcaaaatcaaaaggattctgatattttcccttacaccaatcagactagctaagttcaaaattcaaatgtcagcacatggcgggtgagggtatggagaaagatgtacattcctccattgctggtgggattgcaagctagtacaaccactctggaaatcaatatagtggttcatcagaaaactggaaatagttctaactgaagacctagctataccactcttgggcatactttcaaaagattccccaccttgtggtaataagggaacgttctcctccatttttatagcagccttatttgtacagaatacttaggatacaattcatagaccatgaaaagtgtagcaagtagaaagacccaagtgaggatgtttcagtgccacttacaggggggatgaaataatcatcagaggcagagggagactgggaactgggtggaagagcgaaggggaggcaagaaggcaaacaggatcaggacannnnnnnnnnnnnnnnnnnnaccagagatcccggaggtaagagactctaaagattcaacgggggtgaccttagccaaaacgcccaagtctggggctagggaactcaaacagttaacctcccatagatgggtaggacctcaagcagaaggaaagggtcactaagccacagtccaaattgctgacccagaactgttccagtctaaaggaactacagggacaaaaatagaggagatattgaaagaaaggtgggccaaaaaccagcccaacttcaggtccatctaatgggagagcaccgaggcttgacactattcctgatgctatgatgtgcttatagacatgagcctggcatgtcagtcctctgagagaccctacaagcagctgactgagacagaagcaaatatctacaccaaacattggactgaagtcagggacccctatggttgaattaggggaagaactgaagaagctgaagttggggaaagtgaccctataggaggaccagcagtctctattaacctctctattaacagagaccccagagagcacccacttggagtaaagtgaggaggaatggaatgagaaactgtgagagggggcccctagaaggggagggggaacaactgaaatgcaaataataaaataataaaaataaaataaagtaaagaacaaaagaaacaaaaaaacaacaaggtgtctggctccacacagctggatagaattaggaaatctagacaggatctacaaatttgattcctaatgaatgtccacatgtctctgaattttaagagtttagagaccagtgtcacccaatccatacagaattcagtataagaaacagtgaattttctgattatcactggaggaatcgtcttacatgcgttctcgcgaccggccaggaaagacgcaacaaaccggaatcttctgcatcaaaagctttattgcttacatcttcaggagcaagagagcaagagcaagagagagaatggcgaaaccccgtcccttttaaggagaattatcctctgcctaggacgtgtcactccctgattggctgcagcccatcggcagagttgtcatcacggggaaggcagagcacatggagtggagaactacccttggcacatgcgcagattatttgtttaccacttagaacacaggatgtcagcgccatcttgcaacagcgaatgtgagggcggctccccacagaatcggactcataaacggaaaaaaaacaaaaacatttccctttggcagaaaatttcaatagttctattgtgtaatatggtaagcttagctatgaataattttatatttgaaaattgctaacagaatattttaattgttcacaacactaggtatataatgtataatacatatattaattagctcatttttgcctatccacaacttaatggttattccaaaatatcatgttgtcaatgataactgtgtatgaatttttcttagttgtccactaaaaatgaataaaaagtttaaactgatgctcaatataacactgaagataaaacttacaaggactttgctgttgtgtgaagggaattctgtgaaatttttagcatagggactagtataagaacttctgcattggagtggcagaggtcaaaggtatataaacttttctggacagagttgtagtagtcaaaggtgaatatttatgcaaagggcttctggtcttcccacgggattgataatgcagtaatataatcaaacaatgtacttcaaccatacattgaccccgatgactgtgaagcacagtgattcagaagtgatttataatgcaaaactgaacaggtacaagagacacaggctgccctcttgaaaacagcatatgtgtattgccagagaaaggaagtgtagcaggcacaagcatatgccaagaagggacggtgcaggtgtattatgtactgtgcagcagtagctgagaggctcaaatgtagctgctggagcctgaatccattctcagcagtttgccctaataagtttcatcaagtttgctttgcacatgctctagcatagaagtcttagttggcatagtcttatgccaaaaaagaaacacatgtttttttcacaacttaattatctccagtgatttcattacctcccagacttgcatatttgggctacagtgaggaaatgtcacagactgagcaacttaaacagaaatttctttctcagagttctcgagaagatttcatattcaggttgcttccagatttgatttcttagaaggactttctgtgtgactttcacatgactgccttctatggtctttacatttataaactccagagcaagaaaaattgagctagatctgtagtacttttttcattgaagaaatcaatgtaattggattagggcctttcccttttatttcaactgacctgaaccataccacttcttttgaggatcccctctccccccaatgcatgtacattttgattggtggctttactacataaattttggggaatacggtaaacaacaaagagttaatgaaggaagtctatgaaacctaatataagatgggggctaagaaattatttaacgatcatgatcaatgttgctttgcaaagagttatccagatattgaattagtgataaattaatatattcatgcatactaaatatgccaaaattacatgactcaagtaacatattcttaaattaatactactacttatttatgtaaggtacaatagttatttatttggaatctgtgatgtttaattctatatcatgttgcacttaacaatctcaagtctcttcatattttgctctgtgaaactccacagagtgctcctgagaaagttggtgtgacatttgaggacctttccttactcaccatacctaacaattaagaagaaaagttgaatgacatatggaaaataaaaagaagaaaataaatagttcaattagtcttcaaagcattgaacataattaaagaaaccttagagatattaagtaatctcagcaagatagaatttctgatatttctcctttactttcactgctcttatttgtaagccattggatcttgaaaattagttcttttatacaatttccaaaccctttttgtttcttaacgttgagcatttacagctcaagagaatagaaatttgatttcactaggaagagaaatggcaacaaatcaaaatttatttaccagttcagggaaagagaacagtgatctatcaccagatggtaaatagattagtgttacctctaatgaggtttcctatttttcaactcaatgttctttgcgaattttatgttatttgacttcctaactatttcatttattacaagaaattattaggcacaactgtaaagtctgcatttcctcttcaacttttcaatgtagatttcaagatggatgaaaaatcagaaatataattaaaggagggactgttggaataaattgtgcaattaagctcaaggtagtaaaagcaaaaatagaaataattttttatgtgtgactctgagaagctctgaagaataaaaaaggaaacacaatgtcattgagaaacattctgtggtatccatttgttgctgtcaatttaagatgtgtatttgtatagaaaggtttgttatatatgtcctggtattaatctgagcacattgtgtgtgtgtgtgtgtgtgtgtgtgtgtgtgtgtggttttagagataaccatgcttcattaataaataataagggagcttgtttgagggaggactaattttcctttcctagaagtcatcagttttttacagttgtctagtagtgaaaccttgcctaattcccctttctacatgaacctgtccattgacattgttaccattcatgtgtttttatgatgccctttatatgagagacagttatacactggttcttacaatgattttgtcccctctccatgatgttcccggagccaaagatacagtactgaagtagatgtgtccactgaggctgagctccccaagatctatctgttggtctcttcattgtgtccagtcatggttttctgtgttgatatccatttactataaatagaggtttctttgatgagcatcagctacatgtctttgtggacctagggagatttataatgaaataagtaattatattggtcatcaaagagaagtacacatattcttttataaatacccttattctttatcaatgcctttatattatttttatttatttataacatataatagttcaaatttagtattccaggatcatagatctgtattttggtatgctttgtatatggaagacaaaaagacttgttcaatgatttcatttggattttaaatgagcacaaaataatttttggtactagttagccaagctacttttcaaaaataaaattttattttgcagaaaggttggttttccattggggaatgaaaattgaatcatagtatacgtctttactataatgtagaatatttatatatctaatcatcaactacttcagaacttattgtgaattttctaaatgctacagcccttgtgatattggtttgaattaatttttgcaagatgaaaaatatacgatagaaatagagttcttcaagagtagttatattgccattctttcactgttatacatggtaaataatacaggagtcatggctttggcatttaacatgtttgaagatctgttatcaacaagactttcctgtctcctattattcactatagaaaagtgaacagtagtgggttctcttctagggaaatgggaagatgtcatatcttagctttcatgtgaagtggtttgaaacaggtaaagagtatttgtggaagatagtatcttccatcttaagacaggaaatgaagtttaagagaaatcacataaaaactagaaaataattagatattgttttttgtttgttttgtagaatagtaaaaggagtattgaagtattggcaatcgctcttctttgaattctgcactaaatcaatctggccctgggcttttttttttttttttttttggtggggaggttttgaatggctccttctatttccttgtgggttatgggattgcttagatagtttacctgataatgatttaaatttggtgcatggtatctatctagaaaatccttcattttatctagatttcccagttttgtaaagtataggcttttgtagtatgatctgatgttttttgagtttctcagtttctgttgtcttatctcccttttcatttctgattttgttattttggataccctctcattgccctttagttagatgactaagggtttatctatcttgttgactttctcaacaagggtgttgttaattctttgtatcattctctttgtttctagttggttgatttcagaactgatttttattatcttccaccttctactctttttgagtgtgtttgcttcttttttcctcccttgctggtggaaatgcaaacgtgtccattcattctggaaatcaatctggcagttcctcagaaaactgaaaacagttctacctgaagacctagtgatcactcttgggcatatacccaaaacgtgtcccatcatagcacaaggccacatattccactatgttaatagtagcattatttgtaataatctgaaggtggaacaacccagacgtccttcaaccacagaatggatacagaaaatacagtttatttatataacagaatactattagaatactattaaaaacaaggacatcatgaatagatcatagaaagcttaataagaaggaaggctcaatgataagaaggaaggctcaagtgtggatacttcagtcccacttagaaaagtaatctaaataatcccaggaagcagagggagggacatgggtgggagacaggagggacagagcaaaggggaaaggatcaggtatgtggggagacaggtgagaagctcagagggccaggagaatgaatggaaatgtgcagcagcagggattgggatgcaggggagacctctacaaagtttcagaaacctggaatgtaagaggctcgcaggacacaatggggatggacctagctgaaatgcccaagagtggggagatggaacctgaagagaccacctcctatagatagacatggctcccagtttaggcatgaggccacacacccatcttcaaaaattttgacccagattgattcttgtctaaaggaaatgctagagaaattacccaaggagctaaagggaactgcaaccctataggtggaacaacaatatgaactaaccagtaccccggagctcttgactctagctgcatatgtatcaaaagatggtctagtcggccatcactgcaaagagaggcccattggacttgcaaactttatatgccccagtgcaggggaacgccaggtccaaaaaggcagagtgggtgggtaggggattggggttgtgggtatgggggacctttgggatagcattgaaaatgtaaacgaggaaaatacctaataaaatatatatatatatatatatatatgaaggaaatgcagagacaaaaaaggatcaggtactgaaggaaaggccttccagtgactgcaccaacttgagatccatttcatacgcaggcagtattacttataccatgttgtgcttgcacataggaacctagcgtggtgacttctctgagatgctctagcagctgctgacttaggcagatgtagatacttacagccattggatagaggtcagggtctcctatggaagagttatgagaaggtttgagggagctggagagcttcttccctctccccacaccccacatacatatatagcagaggactgcctgtctggtctcagtgggagagtatgagtcaaatcctatagaaacttgatgccccagggaaggcagacgttggtggggaggggatagaggggagcatcctctaagaatccaaggggactgcagatgaggtgaaattgttaaagaactcagggaccaggatggggggcataatttggaatgcaaataaataaaatcatataataatattattaataataataataatagaaaagaatgagaaagcccattggtcctgtggagggttgatgatcccagacaggagatcatctaggtctctgaggtaggagtgggtgggcaggtgggaaagcatgctcatacaggcaggggggatggaggaggggatagggagcttgtggaaggaaaactgggaagtgggataacatttgaaatgtatataaacaaaaaactaataaaaattaaaaagaaacttccatcattacataatcaatgcatgaagcaaaacaatccataaaagcaaaccaaaaaagggattaagtcgattaaaatattcacaatataatctgatggttagtcttgtttgtcaacctgactaaatatgtaatttactggatacacagatactaggaacacctgtaaggaattttcttaatcagattgtttaaagtaggaaaatccagaatttctggaccactatttctggtgacagcccagataaagaaaatgcaagagggaaatactggggtgttgttgttgttgttgttgttgttgttgtttgtttgtttgttttttttttttaatttgtctgctagccctcactcttgctggaatgaccttctatcctactgctgcagtcgatgttaaatctaaattctacatgattacaatatagactgaagaccagcagttctccaggaatcctccaggactctaggaccaacagcactgcagagagatgcagctacatgaactgaacagctgcaagacattgcctgtctgtcataagacagccattgttcaactatctagaccaaatcatttggaatggctaataaattccatatgtatataagcacatatatatatatacatataacacacacatatatatatatatatatatatatatatatatatatgtttttcacatatatgttactttttcagaaattcactggaacagattataacatcattttcagttctctttaaattatgttttattgcaaaatatttatataatatattttattatgttttccctctttcccaactgctcttttttgacatcttccctacctccctttccaccaaactttatgtgtgttcctctttctacttaaagaagacaagcaaaatgagaaacatgcacacacacacacacacatagtcagtaaaacacacatgacccaccccaaaaaaaacagaaaaatgaaaatcaaaacagcatgaaaccaaaatggcaaagaaccaataagtcgatgtcaatgactactgctactactactaatgatgataaagtcaaaacaacaaaaaatgaaacaaaaagtctacaaaattactatggagtttcttttgggttagacaatttcctcagggcatgatatctgtctgggaggggcagggagtcttcctcgatatacccagtgatattcaattagagaaaatagacttatttctctttaccagcaggtgataattgcagatacgttttggttagggtgggagcccatatccacttccatctttcagtcctaagactttatcgtatttgaatctgtgcctggcttcctatgtgatgtcagtctctgtgagttcatatgtggatcatttctgttatactggaagacactgttcccttgaagtcatctgtcacctcnnnnnnnnnnnnnnnnnnnncacacacacacacacacatagtcagtaaaacacacatgacccaccccaaaaaaaacagaaaaatgaaaatcaaaacagcatgaaaccaaaatggcaaagaaccaataagtcgatgtcaatgactactgctactactactaatgatgataaagtcaaaacaacaaaaaatgaaacaaaaagtctacaaaattactatggagtttcttttgggttagacaatttcctcagggcatgatatctgtctgggaggggcagggagtcttcctcgatatacccagtgatattcaattagagaaaatagacttatttctctttaccagcaggtgataattgcagatacgttttggttagggtgggagcccatatccacttccatctttcagtcctaagactttatcgtatttgaatctgtgcctggcttcctatgtgatgtcagtctctgtgagttcatatgtggatcatttctgttatactggaagacactgttcccttgaagtcatctgtcacctctggattttccaatcttcctaccttctcttggttttgaactaatggaattatgtccaagtaaacaagtctacaaaagcaattcctgtttctgacatagcactttgaggtgagtgtccctgagaatgtttccattagcagtttccaggtggtgggtagattggatcaattttcaaatgcacatttttcatgagctgagtggcctgatcccaggaggagatattctaacagacaaaacatttttatcaaacttggaaaggttgagaaagaactaaaagtgccaagcacattttccactgttgtttcaattaaccaccaccatctcagatgctctttgcaaacaagaaaataaaaatgtagaaatgtggctcttcactgccttgctatggaactctataactactaatcagtgagaaagactcaagtgggaattaagaattccacgctcacctggagacccaaaaacatccaacagagcataggcaggagctaatgttcaggatgtattattagcattagaagcatatatagttaaatacattgtttgaaacaggtattttcttttttttttcaaatctaaaatgcacactgtttaaaattgcagatgaatagttgcatatataaaggagtgtcagtatgtttgacaatcattggtcatttcttctctcttaaagagaaagaattgcagtattccttaccatatttgcattgtgtctatttatttgactacctgaaagatttgacatattccttgctcagcccaggtttagtcagccatgtggatgaaacttcaggtttctagccttagctcagccaggaaccaggctgcctttcatgctcccacaaccatgtatacacaagtaatgttataaagactaaaagagttgtatttatattattcataatgacatgaaaaacagaaaatgtcatagtataaatataattaagataaatactgtccaactatatttgacatataggaaatggaaattggtaaattaaggaattattgcttgcgatgcatttatttaggttcaaactcttttaagctgaggttttcacatagtgatagaaaactggataatattctgcacgtgttgatatgtcaaaagttaaaatgatattgatggagaaaggaattaaaatactaatggtcattctctacctttttttaatgttctgattacagatattctttatcccatttaatgcccactgcacatgccctatatatagtaactgccctaattgtttagaaagaaggcactgatgtttaagacaaatgattttcttgtgttatgtaactgatagaataagacatagaaagtttagagtaaaatgttggtctgaactgtaaggcaactttatttttgaattatgagacacttgttgaaagttttgaaaataaaattatatattttgtagaaatatggaataaatttctctattactaagagaaaaatgacctgcttaggaggaccagaaacagtttttttttttaagtttttgatgtctactagggtgtatataagcaatcatgcaactttctttcataagatcttgattattagattataaaatatcagtacacgtcgcataaataactctaatgatgcatggccaacttgatcccaaaggatgactagtatctggggaaagtatgacctatgctttaaaatgacacctgtttttcacctaaaaagttttgtctcagagaaatgaagatgaatcattgggatcactagtgtggtcataatggcattggttctctcctctactatgtgtctttatgtgcatctctatgttctgaaactaaaggcctttttagttattaaagatctagtcagaaactttcagttttagtagattcctcctgaattttccaatacctaacgtttcccttttagacagtgcatttttctttctgaacatgcaacaactggggttaaggcacagtaagtggaaatgtagtgtcatggatataataaatgttgttcaacaattttaacaagatcaaatacagtaagaatattaactggacatttttccttcttctaatccctccatacaccccatgccctcaaatgtatggctttttgtctttaattgtagttgcacatatacaaccccaccagactcacacacgtacataaatagaacatgtgtagcctgtataatgatacttgtacgtggatgatttcaagtgtgactagttggtattagatacagtctgtgtaacacaatttctactgctcttggaattttttagttaggcagagttctttgtctattgccgagggcctatgagcttcccaatccatgttagcatgtctcctggcgatatccttgttcagattttgtttagatagtcatggtgaaacttcatgtgtacagacatttttttcagaaggactctccaaaccaacttctggttcctctagctcttctagtctttctgccccctatttggatatgagctctaaaagtatttttaatgtttctcattattgatactctgattaaaactgaggtataacacacacacacacacacacacacacacacacacacacacaattcaccttatctctaattctcaatgaatcatttgcatgtcctgaaatatgcagctgcacacatttcagattgtcttctttgtgttttcaattgaaacagcagtgatttcttccctcagatgtattgcttgcaaattcaaggtaaagaataaaacaaagatatagaaagcaggtaatgtggattaatttcttacatgagggttctaaattaagtttttgctgttctcattaaattatttgtcttcaattgggtcatgtataacattaaaataagtcaaatttcaaaaattggtttattagttattgcactcccaaatccagaaagtcagaacagtatcagttttttaaatcaagaataaaatctagcatattatagactgagtaaatataaattaagttcaattattcattattgtaaaagtgaaatatttaggagactaaagtgaaacatatgcaataataaaaatggatgtggaagtcaaaggatggaccaggagggaaagaaaatctggagtgtaaataaataaataaataagaggttaaatagaaaataaaataacagctaattttaaaaaagcatacatttataaagatagttcaatggcagcttaaatttagcatctgaactacagacccatgtgaatctgttaattcacacagtctctagaatcatagccacagattttcaaaaacttacagtcaaaaaaaatttgtctgttgtatataatactagatgtttgatctagaatttgtatgtcatggttggtattgctctttcactagcattttaaaaatctattcttttctcataaaatacaccctgaccttagcttcctctccctccactctcctagaaccaccactcccaacctccctcacccaaaatccaatcctcctccatttccatgaagagaaaagcagccttcttgagaatattaacagaacatggcataaaaggtaaattttaaacaagagtcagttttaagtaatgtggaaaattaaatatcatggagtccctttatgaatagttctctacctgaaactacaactacagtcttatatctgattctgaaatatatatcttaatttaaataattcaaaatataaacatatattaaaaatttttgcaatgtactatcatgacttggacctttcttgatatatatcattatatcaatatctatatttttaatcttcctgtacttccctatatctctatatatttatatcttttcaatataaatatatatggatatggacagaaatacatgtgcaccagataagtctaataggggggtatctaatgtgtgtgctttcaaatcttttttatccctaaggggttaaataccaacaaatgcatggatctttccttctatcagagaatcgtcatgtttgatttttttttatattttacatttatcaatgatcaaaagaaataattctgaataattttatatttagaatttttttgtttagaccccaataggaatttgtatatgattctagcatttgagtccccgaaaaaaacaaaacaaaaccaaaaaaaaaaaaaacaccaaaaacctggtatgaagatataagtagtgttggagagcccaacaaatcaacaaattactttaagtggtttgagtaggatgttgggacttacctatctctcaatagccatttattttgatgatgaattaatagaatctttgatcattatcttcttcctaggatttttttttaatagttctaagggcaagacatatttgggtaattacttactctgcgattaggaagtcagtcgtgtaactaagaaaggggacagataaggtcagaattagtgtccactacaatccaggatggactgacctcttagggtaactgtgaagattaatactgaagggaaatttctatcaagtagaactcttttctaaattcatatgctctctggttggtataatgtacctctttagtactgctttgattaaacctttatctccatatttacttgctactgaacatcaggcataatttcaacacaactgcaaagctttccgtgaaaatatatcccaagttcttctagttgcctgagagaggaagcaagttcacttaggtcagtgataaacaggagcgaggcaaagccaggcactggcttgactttggcaatgaaaaatcaatagttagtggcatacatactgctaccctgatatgcagatagcaccaaaagcaaatatgggaacataagagctagctttttaaattgaactcatcagcaaatcaatagaaagttgatgacattttaatatattgtcccatattttattagagtatatttttctatgtttgaatacaattattttgtgaagttctgcatttaaatttatgcagaaatttgtttaatcttagcaaaattttattctcatttctaccttttaatgttctagacacatggccattataaccagcatatacttactttaaagtggatgctcacagtcatctataagattgaacacagggcccccaatggaaaagctagagaaagcacacaaggagctaaaggggtttgcaaccttataggtggaacaacaatacaaactaaccagtagccccagagcatgtgtctctagctgcatatgtatcagaagatggactattcggccatcactaggaagagaggccccttggtcttgcaaagtttatatgccccagtacaagggaacaccagggccaagaactggcagtgggtgggtatgggagcagggcagggagagggtataggggacttctgggatagcatttaaaagttatataaagaaaatatttaataaaaaattaaaaataatttaaaaaaaggattctaaaatgttcccccttctactaggtctcttaatttttacccacctaatcattcatgaaagccctattcaactaattattgtgtttctggactgcatttactgaacaatatacaacttcactctttctaagaagcaataatattatacatccaaggtttacttgccaatttctaggttacttgaaaagaatctgattatgtccatgttattaggttattttaataacaatagattttttaaaaaaggtaattctggaaagttatgtttttttgggtcatgtgactcagcatggtgggggacacattttaacattagtataaatctttctacaacttatataaaatcatttgataaataaataatgcaagtatctataataaactgtattaaagtcttttctactgctcagacctttacttgaacaaaatttttcaagtggccttgggtttagtgcctttgaaaaatgtatatatttatacttgttacttacttttcaaatattctaaaatggttggagttaaataccattcaataaaataattatggaattgttttttatactgtatttgagggggatatgtggcaaaagtttctgagttaatgcactgcctaagaaactgctcatctcttaccaagcagtgccatcaccatatgcttctcagtgtatgttttccagaatgttctgatctacccttctaggagctgcaaacctttacacccactaggaggtaagattaagaatgcagcttaagttgaagattacattgttatgcttaaatactggtaggacctgatcatctaagagtattttaacatgtgtatttatactctttgaccactgaatacaatattgtctagatatacttcttttgaatatttattttccttcttgttggcatcaaagcagaatccaaaagtattgtttatgatgatataatcattagtatagaaaccaattttgacgcaaaatgaacagcaagcaattctgagttccaacccgaattttgtttgtgccgtaatgcatttagaaacaatgataaaacaagaaagagccagttcactaaactaggtgccttttaaggtagaaaagtaatatattctttaaagatttgtttttattttatgtgtataagtgttttgttttcaagtgtttgcttgaatatagcaaacttgtctgatgtctatgattgacagtagaaggtattatatcatttagacagatgtcgtaggtaacttaaaataagagggagggagagcaagacctagagcatgccttagcacagagagagagagagagagagagagagagagagagagagagagagagaacactttgtctcctttttttcttattcttttgtttgtttgtttgcttttggtggctgttcatttatatttcatgtattttttttctgggttcagtcagagaagatgcacttaaccctcaagagactagaggccccaggacgtttagaggtttggtggggtgggggttgaggggtgggcacatcctcttggagacagaggggcagggaggaggattgggatgttgaatagttggaaggtggaccagtagggaaataaatgcctggggtgttaaaaagaaagaaattaaataaaaatattttaaaattaagtttactttttaattttcatagatatgtactatatttacatcatcctcccgaaatcctttgatatctccctctcaaattcatgacctctttctcattacacacacatacacacacacacacacacacagagagagacagagacagagacagagacagagacagagacagagacagagacagagacagacagagacagagacagagacagagacagacagacagagacagacagacagagacaggaaacagagagacagatagagctgagtctatttgatgtttcttgcttctattgttattgtctaaataaacagtgagcttgtcttggaggaagactactctctgtttgctgttgctatttgcctgtagacttttgcctatggacctggcctatgaaatcccataccccctgtgcacaattggcatgacaactggcattgccattgttcagttctcatttaggcagccatatttgagatgttataaaagcaggctccctgacatacatgaaagacaaaattagacttcctgatcttttaccttctctccccacttctgtactattccctaagtataagggttgtgtgttatatgtatcaagtggtgctaagcagtacatagtcagttgtttgtattttgaccagttatgactttctgtaatatacttgctgcaaacagagacttccttgataagaaatgagaactgcacttatcagtgagtataaggacacatatttagaaagcagttaggaagtataccatttaagaaaagtgacagtaaccggttctcctataagatctgtaaccttattatttaagagtatttggttgggtttagagtaccaggcatgatttccatcctattcaggggacctttagtccaattagacagttgctgattaccatcaaggtataaatgccactagttagaatgcacattcttctcaccctactaggcctctatatcctcctgaccttatcctgaggtcaacatatccaacctgtaggtccaacccaatctggccatcctgttttctggctcagtttgcaaatcaccctgattctccccttcagatacctctctaatccccagacctaacctggtttaacatcttgtgctcttgctgattctggtgaatcccatctgcaccagctgcaaactctgagctttacttttttaaaaaaattattaccgtcttgaaatacacttggagacaatttgtacaaagttcatgtccaagtggatcaaggaactccacttaaaaccagatatcctgaatctaataaaagagaaaaagagaaagagcctgaaacacattggaacagggaaaatattcctgaacagaacaccagtggctcaggctctaaaagcaacaattgacaaatgggacctcataaaatggaaaagcttcttttaggcaaaagacgctgtcaataggacgaattgggaaagcccttatagatagaggcctaatatccaatatgatacaaagaactcaaaaagttagagaacaaaataaccctattaaaaatggagtgcagagctaaacaaagaattcttaattgtaaaatctcaaatggctgagaaacatctaaagaaatgttgaacatacttagacattgggggaaatgctaatcaaaataaccctaagattctacctcataccagtcagaatggctgagatcaaaatctcaggtgacagcagaagctgtcaagggtgcagagaaagtgaaacactcctccaatgctggtgggattgcaagctgttgcaaccactttggaaaaacaacttggcagtttctcagtaaactggaaatatttccacttgaagaaccagctatactactactgggaatatacctaaaaatgctccaacatataaaatggacacatgctactatgttcatagaagccttatttataataggcagaagctagaatcaacccagatgtccctcaacagaagagtggatatagaaaaatgtggtacatttaacacaatgtaatactactctgtcattaaaaacactgacttgggctggtgagatggctcagcaggtaagagcacccgactgctcttccgaaggtccggagttcaaatcccagcaaccacatggtggctcacaaccatccgtaatgagatctgactccctcttctggagtgtctgaagacagctacagtgtacttacatataataaataataaataaatctttaataaaaaacactaacttaagtaaattcacaagaaaatggatggaaatagaaaatatcctgagtgaggcaacctacccaaaaagaacacacatgatatgtactcattgataagtggatattagcccaaaagctcagaatatctatgatgcaacccacaaccatatgtgtgtagcttaaaaggaagaccaaagtgtggatacttcaatcctacatagaaggaggaacaaaataatcacaggatgtagagggagaaagggacctgggatggagaatggagcaggagaaagaaaatgggaaggatcaggtatgggaaggagtagaagagaagtacagtgggccaggaaatcagctgcctatatctcagaggacataaatgggaggggaggcccttggccttgggaaggctcaatgccacagcataggggaatactagtgaagtgaagcaggagttggggggtgggtgggtaggggaacaccctcacagaagcaggggtatgggggatgggatagggggtttgcagaggggaaacagggaagggtgataacagttgaaatgtaaataaataaataaccaataaaaacaataacgaaaaaataaatatgtagcagtggaggataaggggctagggggtagccattagaaagtctcagatgccaaggaagtaagaccctcccaggtcccagtggggatgactttagctgaaatacctaataaattgatagaacctgtagagcccacatgtaggtaggcatgacccccagttaagggctgaggtcacacaactatctcaaaacttttaacccagatttttctcctgtccatgggaaagacagggacgaaaaatggaacagagactaaaggaagggccgtccagagactgccccacctagggtccatcccatctgcagaaaccaaccccagacactatcgctgatgccaagaaacacttgctgacaggaccctggtatggttgttccctgggaggttctgccagcatctgactcatacagatgcaggtactcacaatcaaccataaaactgagctcccagaccacaatggaagagctaggggaaggagtgaaggagttgaaagggattgcaaccacatagaaagaacaacaatatcaactaactgaactacccagagctcacagggaccgaaccaccaaacaaagggtatgtgtggagggatccttggctctagatacatattagcagaggatggccttatcttgcttcaatgggaggggagacatttggtcctgtgttgacttgataccccagtgtggggggatgctagggtggtggggcaggagtgggtgagtggaaggaggagcacccttagagaggaaaagtgtaggattagaggacatatggaatggggaatttgtgagtggaaacagagaaggaagatatcatttgaaatgaaaacgaataaaatgcttaataaaagaagtagcaaactctatttgcataaatttattccaaaatgttttaattataaagtccccaaatatctcaattttagaattaagatgaaaatgtaaatacaatattaaatataatccgaagtttatattaggtttgtgggtcgtttcctaaaatacagcatacatgtggtctctctagcctcaagacttcagaatacctttgatgttaacaagctagaaaaatttctttgaagaaacaagaaagtatttaaatacttttttccattccagttatataggtctcatgttaacttaattgttgtcactatgctagaaaataaatttaaataatttaattcaaatatttgaatcaagaaaaatattacttatatatacttacttattgtattagttagagttttactgctgtgaacaaacaccatgaccaaggcaagtcttataaaaagcaacgtttaattggggctagcttacagattcagaggttcagttcattatcatcaaggtgggagcatggcagtatccaggcagtcatggtgcaggaggagctgagagttctatgtcttcatccaaaggctgctagtggaagactgacttccaggcaaatagggtgaggatcttatacccacacccacggtgaaacacccattccaaccaggacgcccctattccaacaaagccacaccttcaggtggtgccactccctggtccaaggatatacaaaccatcacacttatatataggcaaatattttatatacatatgctatattttatacccattattagtgactatgtacttgcatgtacacaaaataaggaaagcaatacctacaactattttaaagctcaacattttctctacttaattttggtttcaggcactatttggaaatattgatcaaataacaaaactctatgaatttgttattttgatagatttatatcgttggagaagactctaattttttttctgcaaagggcagaaattctctttttcgttagatgagaactaatacatctttccagcaaaggtcatgcctcttcatcactgtgctgatgcagctcaccttcctcagtcctccatatatggaagtcattttgtttagcaacagatgtattgtatggaaacttatagagtacacaatttaaagatggcacaattaatattttgaaatttaaatatatttaggtacagccctcctatttgagagaaatcagaaaaaaaataccccaaaatacttatgtagtttatttttccaatttaatggaattctatccttgagcagtctgacttcaatctgcttagatattaagcatagttcataggtagctacataggtgtttcatgttagaatgtttctagtttttagttaacctcagagacattgtatacatttgtataaagatgaatgggaagaatcttgtctttacttctggacccatgaaaaactttatctttcctttcagatactctgtctagcctatgttcttccaagggaacttcacagatgtatcaaataatggatgatggtatttatctcagaactgcacataatgctcccttggcacagcaggtctttggcttattgagagaatataaattagtacagcccactgtttgccatctaagatgaaaaatagcctggagaggtgctcagcagttaagagaacttgttgctcttgcaaaagacccaggtttccatttccagcagctacatggtggcttacagtcatctgtaattctacttctaggagattcaatgctctcttctggatgcttgggcaaccagcagatatgtggtgcaaatactgataaaccctcatttatagaaaattaaaataacatttacagttaaaataagattcattcattgtcctggaatgcattttagcaaataactgttaacactcagagttttaaatgtattacactaaatatctgtaatattctagctgtgaaataattgcatcatttgcaaaagctgtcataatgtatagattaaatttttgtttatggtattggaatcaagagccattcactttgatagacacatatttcacaatatgagtgaggttagtggattgtccctgtcaaaaagttacataaagatggtccattcattttagtaaaatcaaaattttactatttttcattacgtgtatgtatattattgtgggttggtgtatgtgtgtgaagcacccatggagataagaagaggatgtcagaatcctgaaacttgaattacaggttgttatgagatatacctatgtgattgctgagaaccttagctcttctaaaaagagcagaaagtgttcttaattgttgagccacctcttcaaacagcaactgaaattttaaatattttttgaagagagtatcacctcttgaatccatttaaaagtttgtcatcctgctgttcatatcatagtttaacttaaagtgagtttatatgtaagcaattaaacaacttatttgctgtattaaaatcctcctaatttaaatactttcccaatctactaaactctttgttgtaccaagaggggtgcattcccagtagcatctcaacttgaacaaaactagacaggttgtaaataaccatatataaaaaaaaatcaaagcatgatgttttttcttttccctttttagttagtcatctctacatcactgacttctgattacatacttcggatttataaaagtgagagccctatttttttttatccaacttgaatgtagataatattttgaaatttctgagatggggcagtattacttggccttgggtagaatctttctccttttaaccttgtgctcatgcttactgtctttgccttctaagtacccattgctcatcagaaccctattcagagtcactggagaaagcttctcggaatccttcaggctctattaatgtcaaataccactgatattgccattattaatgggacttcgggcagagagggaggaggtagatggagcttgactatattaacatgcattgactatatattgactgcaaagaagaattgtatctgcaggaagaaagttcaatttccatgatttagtaagcaacagagagacagcaatctggctaaatagaaaggagtgctttgctctttatcaagcagttagtcctacctggaagggaaaaggaacacttttataaatcgtctccttgttttgtgctctctggacatcacaagagtatgtcacatagaaaggaagccttacagactaccacgttcttgttttcctctcgtacactattgcatatttgcaaggtataatgaatataatattatatgaggagctagataaaatcagagaagagaggtgctcctttcattttttttcctcttttcttcccacaaagagaatataatattggcttatttcattccaggaatcctttagccctttctggattcacagcatccattcaacatatgtcaacgctaagtggactctggcagattttttcatagggatatgatgtgtcttttgtcaggagagaaaagaataccctcccttgtattactctcctgttctctgaaggaaatggatgtgaggaaaattaaggccaggtcaaagccatctctgtattgtaccacatgcctcagctcctgtgcactttaggatgattgcgcattgccctgggtagcacttaattatttaaaggaactttcgcttattcttacagcccgcgcatgattgagaccttgctgtgatgccaagttcctctgtctcagagagaaagaaggcagtttggagatcaatctgaggtggcagactgtaatttaacaaggagaaaaaggcactctgtagctcttctgtacagcaaggccaattgcagaatgagtaactctaacaaaacagaaggttgggtagatgaggcaatgggatatgagcagattcactaattatgtacttgccatccatatcttgacaaatagttatagcgaatttcaatgttttctatagaattttagatagaatttctgctctgatgccagaggcttctatttgagccacacaacaaacggctgggaaatgttgaatttagttaacttccaggtctcattttctctccatataaaaagagatgccttaatatctagctcaggtttgttcttaatattaagtaagctaatgcatgtggaatcacttccctaatgtggttatcagttctaggatgaatatcaggtcccctcttttgcagcatgaaatgtcattagagtacctgtaatggccatttaaaaacaaggaccaacttgctgtgaaggagcaacgacctgctcaatcagtggcatccacgatagaagcatttataccattacttgtgttgggaaaagtactttaacttgtcttccctatggcatgggaataataatgaccagactgcctaggtctcttcagccaagtagctagacacctccaacaaatgctgataactgtaattccagttgtgatttgagagagttctactgtgcttctccacctatggagacatgttgacactgctaataatgtagcactttgaatttcaggcctccttgggaatatgcattgagttatttgattatgaagattattagcatgatgagtcatgcctctaacattatgaatttaggtgagtattaatagagtggttagaaaaacagggctggcatgaattgaatatttaaacttggagaacacttttcttagtaagagttggaatgaggaaatttcacaagctgatatgtttgctactttatttcgtttaattttagcccccaagattattaggctacatctgtctccacatctagtggttattgtatactgttctatgcatgaataaaaatcagaaggacaagtgggtatgtataaatagaagataatggaaccttaatgctttataactatttcatatgtgaaagttaatccagcctcagaatatagagcagtaattccccagatatccacatcctaatactgttgtagtgacacctgcatttcgacattcactgaagaaggaaggagcctatacaatccacagcagaggttatgcgtggcttaggaacatgccttcatactcatcaaagttgtcttggcttccatgggtgttgagagcccactctttagcagactggactaactgaattccagttactattctccaattgacagcctgatgattagcctgttgtcttgttacaagtgatcaccttagatggcactagaaaggactctgctgtctatcttatatccggataagatttgaggaaaaattgtaaaagctttcctacctttttttcttgttttatattttctagaaattcatttttaagcttagttcatattaactttaattttatacaaatattctatgtattttagcagttttaatgagatgcaataaaatatcatgtagctattaaaattttacatttaatgaatagtagagttccacaggcattattgctattcattcttaaaagacattcatcatctcctaaccctgcatgtgtttgctgtttgttattcctacctacctccagttatttggagccactgatgtgttttgtagctacaaatttgagttttctgggcacttaagataaacagaattgtcatgtagcacttaattaacacttacttttttgcatattgttctgtcaggtagtgtagtaattttgagaggcacctatggtagaatgcattgatagtttttgttttctgttttgtttgtttgtttgtttgtttgaacttgctgaggatatcaggtcatagctgtatgaagttgtgtcgaccttcttaaggtgatccattgaaatagtatttctgttttactcagtttatatgtccctgctataaacaccatgttatgtctctgtatacaaatattcacatttcctttgaataaaccgaaggctagaattactagcccatatgctgtgtttgggtttcacactattactaccaaatgtttcatcatattagctgtgttatttgatttagccctttgtaatatatcaatcagcacaccaattcctctacattcttgccaacttttatttatgtgtttttgtaagacaatgtgatgggaaacttctttgtggttttatttcacagtaacctgcttataaaagtgaatacttttgtgtgtcttttgtcctttcatgcaacctaatgaaaaatccctcctaagatttcttctagagttttgtatatatatatatatatatatatatatatatatatatatatatatatatatatatatatattgtatgtactaattacatatgtagagtgaagtttatattttcatgtggatatactattacctaaatatatcagataatatgatgtacatcattatcaattaagtatctttgcactttagtaaaagatttaattgatcataaatatgagagtttaattataaaattccagttctttagtaattttttatggctttattagaatcaattgtattctgttttaaacattgtcatttaacactaatatctagaaacaccattgtgtattttctaatttggttatttgtcaaaatttcttggttaggcttggtcataatctctgtaaaattttttaaaaatattccaaattttctgttgagaaaacgatatgtcaaacttcccatccactgggggggtgggtgtgaattgacatttctaggttactgagtgttctggtctataagcatggaacatttctgttatttgtgtttataatttccctcagctataaattctttaatttttagactcggaattttttctagtgtgtagaaatacaatatttctatgtatcaatattttgtattatgtaattgttttacacagttttgtacaaatggatattctgtgaatatcttagaattttctctgtatagataacattttctgcattttatttcttgcctttcaccttggattttctgagcagaacagaaattttagtcatacttttactagaagaaacaagaacgaccatatttatcaccttcctgattttggaatgaaccatgagtctcttccaattaagaattatgtttcttaattctgtaggctcattataattatttacctgcaatatgaggaaattcacaactattttatgctctatggtaaattgaaattccatttttttaaatggctctgcagcagttaggaaaataattttgttttgctctttactactatggtgtacacactcaattttcaagaattaaactaaatttgcctttctagattaaatttcacttggtcttgcatataattttcttgttcaatttcggaactcagtttcctaacatttacctagcagtgctgttcaagtattcccactgttaattgtttatgtatttactctattttttttcagcatgaagtattgaaagacacagcttgaataataaattttctcttgacactttcatttctgtaactgttgtattcctgtataatttgatacaccttcctgaaatactgacaggtctatccatatttaattggaacaactcattgaaatacagcaacatgtccttttgttgtctttaaaatatttaactgccattctgcaagtagtgtctaagatcaacttcacttatttgtacattatacaaggcttttctcttttaactcaacttttgtgtgtcttttttttttaatgtgtctcagtagacaagaatatagttgaataatttttcttctgccagttctcactatgtacactagactggccttgaatttatgtttctccagctcttgcctcttgactactaggatgacgagtgttgtccaccacatttgcctggatatgattttaagtctgatcaagcagttcaggcactttaggcagtatatttgacgattcatatttaatataatcttaaatagttacattaatttgttatgcttttgtttctttccatgttccttgtttttccattttcatattaagcccatgctagtttaatgcttaagtttaagtttttaaactttctcaaagtttgctctatattgtactatcctaacttaccacaatcctcttcatactctaattctgaaatagtattttttaaaacttttctcccatgtgatcttattcctgctccctaattacattacatatatttaaaaatatttactagtgaattttcatataacactagaacagtcagtgaaggtgggaatattcccccaagggatttaatgttcattacatgtcttcatttctataaatttgaattgttctctgaggcctttataaaaaaaatgttttatcttccttttcaagttatgtctcaagccaacatattttcttcatctgagaaacatgagataacatgatgtttcatctaaacttttggaagagaattgatcctggaagtagtgttctcagggactgtttgtgcctctcagcctttgaagcatgtatgtacatatccatggctgtatggcctctattttctttttccagaaattaccctggaccttctttgtgtgcatagcttctgattcccccgttctctttagccatgggtctctggaatgtagctataggctgtgaggtgatatatatgaatcattatgatttgttaactatgaacaatttcttccctgtctttcttacatacattgtacattagggtaaatattttgtattgctggaatttcataaggcagtttgcattgttcatttttcttctcttactccaccttctaactatgcacacttttgtgcaatttatgttttcttacaaaatttaaagtttttgatcacatttttttacaatatctttttttccttaccttcaaattaggtcatttctaccaaactatcttcaaatttcttaaactttcactttgtaatgtcaaatctattcagacttatctaagaagttttcgtattattttataaaacttttattccagaattttaatgtgtgtatgtgtgtcctgttacttacttgagagtctttaatttctatgtagtttagattatctgtatattaataaactcctggttccaataatgttcataatgtagtttttgaaatatctgctaaatctttcaaatgtatgccaaatctagcatacatagatgtgaataaataataacttttgacttctagtttaactaataactttatatttccttgtttcaatatccattgtattggttatggctggaataacatatttcatatgttattatgaataacatatgaaagcaataacatattaaataacaacaattctagattcttgactatttttgattggttggtattgtttatttttgctgtcattgtttccattgtttgtattagaaccaaattgatggtgttcttggtactgatagaggtggcatgaatgtgaaagaaagcagactggcacttatggaacagaattgttctctcgtcagagcaacagaaggttggaattctctcctaagagctggagactgtgagcacttggcctgggaatcgtgagattttaacagaacaaaaaaggtggacattggggaaagcagatcccatctgtaggtctctgttcctgaactctgtaacttatcggtcctatggttccatggttttctccttatcagaagctaccgtcagtgttattggtcagctcaaatttcctgtatggagcttctcagtctacccaaggcttttagaaacttgaccctacagtttgagaacatcatacatacattcagtatgtttttattaagtttactttcaattatttccacaccaatatctctcatacctctctcctctattccataccaacttcattctccagcttccttcttcacctcaacacacagcaaatatgtgtgtctgtgtagaatcttgcactagagagcacactgcattcttgaaaacagagttcctgttccagaagctctcaattgctgattgaatttcaacacgggttaagacatcataaccacctccacttctactgctggaagtttacatcttggttgagctcattcaagtcttgcttgtgctgctacaatcactatgcgttcatattttaaatatcccacttttatcctaaaaaaaaaaaaaaaaacactgtcattgtagccgtctcttgcctttggctgttgcaaaatttctattcccttttccacagtgattcctgagccttgagagaaaagtgtttgaatagatgtcacactcaggactgagaactccacagtctattatcccctgcctgcttagcagttatagctctctgtcaatcagcatctgctcctaagagaagcatctctgataagagctgagagatgcactggtgtaagggtgcaatgtgaagtcattatgagtcaatgtaaactaaatacctgtagaaaataggtttggggccctcggaggggacctacttccattgcttgatggaaatagtattaaatcatttatttattttgtttgatttccattttccttgcttagtaacatttttggcttaagtatgaaattcatatcttccatgcatgtggctgcttagtctttgccccaaactttggtgtgtggttatgggtgggtgtatgctcaaatgcatatatctatgtgtctatatgtgttttaattctttttgttaagaatagtaatgtttattgctattatttttatattgttattattaacttgataataggggctcactaggtagcttttgctgtggaattgtgttttaattcttaattttggtttaatttcagatttttaggatttcctaaaataggttagtttattaattttcaggcctgtcaccattttagagtagtaagcttccatttctttaaagatgtaccaaattggataggacacacataactttaagccaactttcatgttttctctgaaatttattttctgttgtgtgtattttcaactatgaagccttagaattagtaaaatatctgtgaatactttgtagaatcttacattttatctatatgtatattaagaatcaatcaaaaatttgatttacacattagtgaattcattgtgtgggctgagagagcttgttatttgttatgaaatatcaacttcattatgaatcatactgttgagaataaattaattcaccattagtcaaaatgtgtaaccagatatcaagaaaaatggaaacatggggtcactgggttcttccttatgttttaaattcagttgaaatctttttaaaaatacattgtcagtgttactaaaactcatcatttcagttgaattagttcaggatatacctggacttttccttgtgtaatagttctgtggttttattttgagatattgtaaaataaagagaatacatacactaacgcagtaagaatagagtgagctgatacaggatgagaagtgtatttcatagttagatacttatagctggaagaaagacaaagggacacatgcatgagacaatttttcataaattataaatatagtttcattgtcttctgtccatgatcatgtattatctgtctctggtatgaaataattgctgagattttggctcttatctccaatatgagaatatgaaatggactataatatttttcaaactttgaggtgaatagacgctaaatacatgattatatttcactggaagatttcacagatgagatttcataggtaaagttcaaggtttcatatttttgccttcctaaataagatagttttctgtaatgtttctgggaaacataaacaaaaataccaagataatattaaaaattacatttattttgtaattccttagctatgtactctaatttggaaatagtttttatcctttgaaatcccttatgcagttggttgcataataaaaataaatttaaggtctgcatgttcaaattacttgttggcacagttcatgaaacagaaaaaatgtaggcatgtacagtgttctctcagaaagatattaagattgaaataaattatgagactaatatgaaatataacacttgtgagaaaagttgaagacctgatccatgacagtggaaatggaaaaataggatacaattctaagatttgtgtttacaaataaaagtgtgaaatttaggaagttaaactttgcaaatggaaaggatacatgcatcaaacatcctgcctatgtctctaatctcaaatctctgctctcattttgtcattcattgcacaaagaataaaatattggaaactcaattctattgggaataggatgacatctgacactagaaaccatgtctcctcaacaaaacgatagtaattctctgtgccaggcagagaaaccttaaataaactcctaggttctaatgaggctgacagtctgaatcatgctatattagataatgttctatagctgtgaggagacatcatgaacacagaaacttttaaaaggaaaagcattttattggaccttgcttacagtttcagcgttttaatccattgtcatcaccagtgctgcatgaagcttggggagttggctgcaggcaggcagacatggtataggagaactaactgggagggttgtttgtttggtttttttgtttgtttttggtcttttggtttttcaaggcagggtttctctgtatagccctggctttcctggaactcactctgtagaccaggctggcctcgagctcagaaatcagcctgcctctgtctgccaagttctgggatcaaaggctttcgccaccactgctcagcctaactgggacttctacatccagatctgcaagaagcacgaagagagacattaaacttggcttgagtttttgaaaattcaaagcccactccccgtgttacatttcctccaccaaggccacactcctagtctctctcaagtagtgccactcaaatatatgggcctttggggggccttttcaaccaaatcaccacacttgctcaaactttcctagttatcccagttatgataaaacatcactatccataaaggtcactggaatcttgataccatgagttaaaagttttaaaaaaatatttttaatatattaataggaaaaccagtccacaaagaactgtggtatcagaaaatatttgtgtgtttcttttgtctctccttccctaattgttcttctcttcattgatatatatatgaagaataaaatataggttgatttctcagacctgccacctgcaattcctttcagttagacaaatatgtgagtctgccacctgcaacagacatgctggcaggaagttttctgcttgtggcaaagacatgttcatgttggctgttctagcccgagatacttgtaattacatcagtacagctgccttgatgtgagactcgggccaagctaactggtgtagaaaaatattactggggaaagatagtgttctattaacttacacattctgtctcaagactgtctgcttttcctttgtagttgtgtcagggagggaccgcaagcattacatcttcatgaacagccattcaaaggcacttacagccttctctggatagaatgtatttggcaagggatttgatggtgaaacatgtcagcttgccccatgaaagctggtcctaataatagttctcagcttagtgttaattcaacagtgtttgtaaatccaggtaatctcgtagataattattgattcttcatgtattttcctatttcacttaattttcacattaattctatgaattattataagtagcattatacatatgcttaaatcaagctagttcacacatacatttcatcatgtagcttgcatttatgtggtggggagcactaaagatcaactctgttaacatttctgaagatgtttgtacaaaacacaccctctagaatccaactaatagatatgttttgataagtacatattatcagtgcttaacatttgttttcatgacctttgataactgcacttcatcagaatattcaaaatgcaaagctgacaagactaaaagggtaaaaccaaccctgaagacttggtttccaagctgggaaacgttttgtagaaaaagaaaattgactcccatgtttccctgcttccacacacaatctatgtcagaaatgtgtgaatgtgcacacacaagtacatagtataaatcaatcaatcaatcaatcaatcaatccatcaatcaatgcaacaaaattttgaaaaataataagcacaccccttctttaaatgatatctgaattatgacagaatcaagaagttaagccaatgactgcccttctgaatgcctgtcttatacaaaagctaccatattcttctctaactaagaagaaactgaaacttcagacacagtcatttgggcagaatctcctaatattccctgtgagtctgtgaaggataggacagccacatttgcttttcagaattccctatgggtaacagctcctttgttttctgctttctggtctcaaagaaaagccaagagtgaaatccaggcaagatgttgtcccagagaattggggtattgtcaagctcttgcttatgtctttcagatcatccttatactctctagtggcctagaaattaagagttaccatttgcatccaaaaggaagcaggtaccagtcaacccatatagacgttagtctctcatctagtcccaaaggtgattgcttaggtttttatttccagtgttacttgtatacatgggtcacagagtttcaagaacttgtgctgcacctgggggtgtggggggtgtggtggtgcacgcctttaatcccagcacttgggaggcagaggcaggtgaatttctgagttcaaggccagcctggtctacaaagtgagttccaggacagccagggctatgcagagaaaccatgtcttgaaaaacccaaaacaaacaaaaaaacaaacaaaaacccaaaacaaacaaaaaaacaaacaaataaacaaaaaaccaacaacaaaaaaaccttgtgctacaaatagcttaaatactataagaaatatatctaatttttagattcaaagctggaatacaaaatatatgtctttattaaaaccagtaaacaagtagacctgataagagtcatgcttgtattatagtcatgctcttttcctgaatttacctgcaaaccagtttttatgagactggttgtcctcggtggtagttgagtattgactgatcagagcaggaaagaatgagcatataaatagagagagagagagataaataaaaagaacatacacggaattgaagaatgtgaagtggtttcccatgcacagcaattcgtggagattttccagaaattcatagtccggagcagggattttaaacctaatagggaatgaaacctgaaaatccatcaatggtcaatgtgaactggaaatgaaattatctgatacaatgtaaaacgtagtcagttatgccatacattctaaattgaaaattggatgatctgagcagttagatgaccattctaacactgcatgatttttctacccacccaagttttggcttgagaataggtaatttggggaacaatgattgtgagttcttgagaaaattgagacattttataaaaacattctttataaataattaattttagaggcttatagcaagaaataaagcttgttttgttttccctttctcttcctttttctctcatcatctatctatctatctatctgtctgtctatctatctatctatctatctatctatctatctatctatctatcatttatatcattgtctatttccctcttctttcacactgtcttgctgcaccaatttctgtacaatttatagattccaaattcactagtatttccagcttcaatcctgtgcttgttcttgatttcaacctacatgaattatagaagaaaggtttctttgctgtattgcaaacaaatggatcactatgttttaatatttttaaaaataatgctttatttaatttttgtatttatttttgtatatatggtggtatgtatgctcataggatgcaggtgaaggccagaggacaacttgtaaacagtttctgccacacagtcctaaggataaatctcaggttgttaagtaggttggaacatcattacccacagaaccatctgtccaggatgatgccttatttcttatttttctaatgttgcaagtctagtttctcagttcctatagaagcattttttatggtcagtgaacatgaaagtgcttgtgatacttgatgtttgtcattggagtcatggggtcattcattcatatattttctcatccacattaaatgatatccaaggtgatagagaaaagttattctttttattgtatattttctttatttacatttcaaatgttatccctattctcggtttcttcctcagaaatcccctgtcccatccttcaccccctgcttctatgaggatattcccgaacccacccacccactcacacctccccaccttcgcaatcccctacactagagtatcgaaccttcacatgatcaagggcctctcctcccattgatgaccaacacagccatcctctgcttcatatgtggctggagccatgagtaactccatgtgtagtctttggttggtggtttagtccctgggagctctggggctgggggtgttcattgatattggtgtttttcctatggggttgcatcctttcagctccttcagtcctgagaaaacatattcataattatctagagttaacaatatgtgtttatacactatttctgcagtgctctccaaacaagtgaagttttccagaacttatcttcattatttttgtaaaagttttcttaccataattattaatatcacaattgttattataatataaacattaaatattaagaggtagcttttatatttgataatcatatagtttataaatgtattactattattttttcactatccattagttattttgatgggtttcattatcacttctagttctcaagcacaaattggcacagcttttgttattatgtctctgtttaaggaataaggaagccaagagaggtcatgaaatcactcattagaaataatataactagcaattagaataaacaaaatactggtcctgagatgtcagagtcttatgttattccagaagatgtaaaacattggccctcaggcacagacatggcagctgctgtaccctggcatgatcaggaatgcagatttttatccaaaacctttcagagtgcaatccaacagtatggtaatttctaaaatacaactttgtctgtagttcccacacaattaagataagaaatcctctgtcttgccatgttctagtactcccaagttgagaactattggattactgctggcttgtgatcctctatctgaaaagcagagacataaaaaaaaatcctttacgcccacagcagagacctgtggtatatcactcagctcaaaacacagttctttctcctctaaacagaacttacttatgttacagaaaagggatggcacaacctttatgtcttctgtcctctcagggaaagtctggaaaaatacaacttaatgtttccttaaataacaaggctagtatagaaagtatcttcctggagtaagtggctcacatcactacatagagatgcaaaactaataaaggtacgatcatcagggtattcagggtattggatgcctacagctgttttgttgtttgtttgtttatttgtttgttgttgtttttccagatagacttatcaccatagggttgaaagtaatgatacatccttggaaataaaagtgacccaatatcctgcttccggacagatcacactggaaggtgcctgtgtgaaaattaacacactattgccttgtagacatgctgaaatatatctcttaactcacagaaacaaattcctagaaaattaaggttgtcagggtatggggtgagataagtagagattgaaaagtgttaaggaagatgtccatgaagttgggaaaatcaaaacatcttgtttctaagcgggagtagggatacaatgaaaaaatgatattttgtttgttattaaatattgtgtaaatgccactatagaatatttctaaaatgtcagaattccatttgcatagaatatcacttcaaatgcgttattaattggagtagtaaaaagtcagtcagtctaggcaatacaataaataattgtcttaattaaacatcgtgaggtgtgacctgacaagtcaacactgatcccgtgacacaaatgatatgaaaaggcaagacttcattcctttcttcatactacagagtttcagtacatagtactacatattttcagttaactttgggatgacggatagaggatccacctctgtatctccctttatacaagttgacaacatatatatatatatatatatatatatatatatatatatatatatatatatatatatcctgctcttaaaaaatccacgtgatgtgccatatatcaaaaaaattgaggaactagtagaggtattagggattagctttgcattatgcctgatccttaaaaatgaaatgagtctaatatttctgctttaccacaacaattgtgtcctatattcctccttcagttaggaaagggtcaacaacctatatgtgtagaagatacctgagataaacaacttgccaagagaaaagccttatttggcttaccactttaagtggtatatcatgatcattatccagaatcactggtggcacatcaccatgagtgaatattgcagggaaaaatacctatcctgtgactgtaaaatgaaaaaaataaagataaaaagacactggagaggcactgtcccaaaggcggtctcaaaaaatattccagatctttcagtagagccaatataggaatctgtggatgaaaatgtttaatcttactctggggcttctaccccacctttgaatattagttcctgaataaaacaaaaacataacttttatatttataataagcctttattaggaacaatattgggcagatatctaccctctgtgctattgaaatctgttttctattgataacctcaagttattacttagtctctttcatctgggctgctaaatccaataggtcattcctcatggccaataattattgactttcaacccatggcatcattcttcttcttcttttttttaatatttttattacatattttcctcaattatatttccaatgctatcccaaaagtccccataccctacccccacttccctacccacccattcccatttttttggccctggcgttcccctgtactggggcatatacagtttgcgtgtccaatgggcctctctttccagtgatggccgactaggccatcttttgatacatatgcagctagagtcaagagctccggggtaactgggtagttcataatgttgttccacctatagagttgcagatccctttagttcattgggtactttctctagctcctccattgggagccctgtgatccatccaatagctgactgtgagcatccacttctgtgtttgctaggctttcttctctctcctcctgtttgtcctcagaccccaagccaaggagccctaaacctgcctatttctcctctgcccagctattggctgttggcgtctttattcactaatcagggataactaatcaggtcacataatgtcactttggtataagtgattctgtaagagcaaccagtgtttgttaatatatactaatattttattaattattttatttacatttgaagtgttgttccctttcccagggctcactccatgagcactccatgctagcacccttccccttttcctctaagagggtgctgcttcacccacccactcctaccacagtattctcgcaccccagttctctggggcatcaagcctccagaggacaaaacacatgcactcccactgaggccagacaaagcaatcatctgatacacatgtagccggggccacggaccagctcatgtataatcttgaattggtgtcttagtccttgagagctcagagtggtctggttacttgatattgtttttcttcctatggggttgcaatcccgttcagatccttcagtccttcccctaattcttccataggggtcctcaggttcagtccaatggttggttgtaagtatctacatctgtctcagtcaggtgctggtagagcctctcagaggacagctactccaggctcttgtctgcaagcacaacatggcatcagtaatagtgttttggtttggtttctgcacatgagatggcttccaagtttgggtagtcactggatggtctttccttagtatctgctccaattttgtccctgaatttcctttaggcagaaacaattctgggtcccaaattttgagatgggtgggcgggcgcatccttcaactggggccatgtttatctagaggaggtggtcacttcaggttgcatctccccactgttaggcattttggctaatgtgatcactattgggttctgggagcctctcatatcccgcgtgtctgggagtttttagtccttccccttgtccccaccccaaactgctgcatatctccattcatttttttttgacccaaggggctttcatcctgtctcctctttcccccacctcatttctgccacccaggttcccccttcccactgcctcctatgattattttgttcactcttctaagtggattgaagcatctacattttggccttccttcttaagattcatatggtcagtgagttatatcatgggtattctgaacttttttggctaatatcctcttattagtgagcacataccatgtatatccttttggttatgagttaactcactcagtatattttctagttccatccttttgctctgaaaattcctgatgtccatgatttcagtagctgagtagtattccactgtgtaaatgaaccatattttctgttcccattctttggttgagggacatctgggttgtttccagcttcttgttattaaaaattaaggctgctatgagcatagtggggcacatgttctgtgatatagtggagcatcttttgggtatatgcccaagattggtaaacctgggtcatcaggtagaactctttccaattttctgaggaaatgccagattgatttctatagtgtttgcaatcccaccagaaaaggagtgttcctctttctccatatccataccagcacctgctgttgcctaagctttttaacttagccattctgattggtgtaaggtggtatcttagggtcattttgatttgcatttccatgatgactaaggatgttgaaggtttctttagatgcttttcactcatttgagatttctcagttgagaatattgtgattagctctgtagcccaattcaattgggttatttggttttctgaagtttcaattcttgagttatttgtatattttggatattagtcctctattggatgtagaggtagtgaagatattttcccaatcagtagattgctgttttgtcttattgacagtgtcatttgaagttttcagtttcatgctatcatatttgtcaattgttgatcttagagaatgagacattggtgatctgttcatgaaatttccccctgtgccattgaggctatttccctctttctcttctatgagattcagtgtatctggttttatgtgaaggtccgtgatccacttggacttgagctttgcataaggagaaaaaaatggatcaatttgaatttgcctaaatgcagatctccagttagaccatcagtaattgttgaaaatgctttcttttttccaatgtatgtttttttttccttctttgttcaagatcaaatgtccataggtgtgtgggttttcttgtttcttcagttctattctattgattgagatgtctgtctctctaccaataccatgcagattttattactattgccctgtagtacaccttgcagagagggatggtgattcctcctgaagttcatttatttttgagaatgttttcactatcctggtattttgttatttcaaatgaagttgagaaatactctatctctgtgaagaattgtgttggcattttgatggagattgcatttaatctgtagattgtttttgataaaatggccatttttactatgttaatcctgccaatccatgagcatggctgatctatccatcttctgaggtcttttggatttctttcttcaggaacttgaagttcttctcatgcagatctttcacttgtttggatatagttactctaagatatttcatattacttgtgactaatctgaaggatgtggtttccctcctttatttctcaacctttatcttttgtataaaggaaggctaaatatttagttgagttaattttttatatagctattttgctgagttttttttatcagctgtaggagttttctggtagaatttttttgggtcgcttatgtatactatcataaagtctgcaaatagtgataccttgaattcttcctttccaatttgtatacccttgaccaccttttgttttctatttgccacatctagaattatgagttctatattaaataaatagggaaagagtaggtagcctgtcttgttcctgatttttgtaagattgttctacatttaatttgatgttgggttttcagttgctctatattcacttattatgattaggtatgttcctttaaattctgattgctccagcacttaacatgaagtgatgccatattttgtccaaggtgttttcagaatcgattgagatgatcatatgattggttttctttgaatacgtttatatactggatcatgctgatggatttctttatattgatctacccctgcatcctgggaatgacgcctacttgatcatggtttatgattatttcattgtgttcttggctaagatgtatgagaattttatttttacatcgatattcataagcacaatcggtctaaatttctctttctttgttgagtctatgtggtttagatatcagagtaacagtagtttcatagaacacattaggacatgttccttctgtttctattttgataatagtttgaggagtatttgtattagtcttcattgaaggtctggtagttttctgcactaaaaccatctggcactgggctttttttggactggagacttttaatgactttatctatttccatagatgttatataattgtttaagtagtttacctggtcctgatttaactttggcacatcgtatctgtctaaaaaatcttccatttcatctatgttttccagtttgtagaataagatctgataaattttttgaattttctaagtttctgttatacccacgttttcttttctgaagttgttaatttgtatattgcctctgtgtcctttaatttgccttagcaagggtttatctagcttgttgattttctcaaagagccggctcttagttttgttgactcactgtacattgtgtttgtttctacttgatttatttcagccaggtgtttgattatttcctgtcatctacttctcttggttgtatttgcttcttttgttctagagacttaaaatgtgctattgtgctgctagtgtaggatatctccaatttctatatgaaggcacttatgctatttattttctgcttagcactgctctcattttgtcctataaatttgacaatgctgtgccttcattttcattaaactctataaagtttttcatttacatttttatttcttctctgaccaagttatcattgagtaacatgttcttttttttatgagtacatgggctttcttttgttttccttgttatttatttatttatctaggattttcaagaacgggattctctgtggaacccactctgtagaccaggctggccttgaactcagaaatctgcctgcctctacttcccaagtgctgggattaaaggtatgtaccttcactgcacagctatgtttttcttgttattgatgaccacccttagtctgtggtgatctggtagaatgcatatgattatttaaatattcttgtgtcagttgaggcttgtattatgtgcaattacatagtcgattttggaaaagttaccatgaggtgcttagaagaagttatattttcttgttttggggtgaacagttcttcatatatctattaaagccattttgttcataatttctgttaatttcactgtgtctctgtttagtttcttttcagtgacctgtccattgttgagagcggggtgttgaattctcccaatcttattgcttaaatttcaaagtgtattttgagctctagtaaggtttcttttgcaagtgtgtatgttattgcatttgggtatggatgttcagagtcagaaatttctcagtgattttttttcccttaattagtataaagaattgttccccatttcttttgataacttctgcttgaaaatctattttattagatattagactggctactccagcttgtttattttgggaccatttgcttagaaaacttttttccagccttttcctctgaggtagtgtctgtctttgtcactgaggtggttttccttattcagcctatttctgggtccaatatatgtatccagtctgatagcctacgcatttttattggggaattgagtctacggatgttgagagatattaaagttcaatgattattgattcctgttatttttgttgttagaggttgtattctgttcgtgtgattctttttttggcttattatgagataattcattttttgtgttttcttgagtgtacttaccttccttgtgttggagttttcctgctagtatcctctatagggatgggttagtagaaagatattgtttaaatttagtatgtcatgaaatatcttggtttcttcatctatggtgattgagtgtttttctgggtaaaatagcttggactggcatttgtgttctcttagatattacatgaagtctctctagtatggtctggcttttagagtctttttttgagaagtctggtgtaattcagatagggttgactttataggttggccatttccccttagtgctatcaatattctttatttgttctgtgtatttagtgttttgattatatgtgttggaagggatttcttttctggtccaatctgttgggtgttctgcaggcttctaagtttatgggcatctctttcttcaggttccagaagtttgtttgtttgtttgttttgttttgttttgttttctgtgattttgtgaagatgttttctggccctatcagttagagatcttcactctctcttattcctattattcttaggtttggtcttttcattgtgtcatgaatttcctggatgttttgggttaggagctctttgtactttgtatctgttttgactgttgtgtcaatatccagcagcaagtatttagcatagcaaaagaccaaacctcaacagaaccatgagttcagcatgtggtctcaggcattcctgatgtgatcagttgtggtagccatccacagcagatactacttcaagagtaatattttaatcttgagtgagaaaactgaaatgttaacttcaatgcagctaatctattccaataattcttcttttatatggactgctttaggtatgtctttgatcaatgcaatgtggtactaaatatttatagaaatattctcctgtgttaagagtttttattcttggtgtattatatcatcacttcttgttttgtctttttaaataaaattcccaattgtgcacaaggcacctcactgtctttatatctgttcttttctcctccatttcttaatctctttctctctatttgtttgctttgtcctattcccatgtgttagttttttgttttattttatcttatttttaaaatactatcccttagatgactgcttgttttctaatgagtgaaacagcatagatctggatgggagggaagatcaggagggattaggagtaaagggaatccactaatcatatatattgtatgaatcaaagtattttcaataacagaaaaataaacaaaagcacacacacacacacacacacacacacacacacacacatatatatatgaaatctggaatattctctcaagattctctactgttcaactattgataaactaaggtaaaaaggtagtaacttgaaagttttgaggatcacttggcttatggtttatccaactttaaattagactgattcaactgcgtaataaggataatgatgatacatgctcaggtagaacgcaatgaaaggataaaggggatattccctctgcttctatagggttcaaagaatgcttattagccaagcaaattatgcaccactttacgtagaatcattaaacatgtaaaaaccaagggtggttatgaaactatatcaattaggtgctgcacatctcagggaagtaagtagtttgaagaaatctgggtcactggaaaagccaaatttcttggaagtatatttttaaaccaaagcttcagagatatttttattctactgaaatatttcatattctacagaatatgtttgcattttaattcacagtaagaatggacacaaagtatatatagatgataatgatatttataagcaaatgaggttgggagaaattttaccttttcaacaactaggaggaaaactgtaaggaggaggataggaatgagctatataaaattagtctttcgattaattgattatattttaaacaataggataaaatggtgacagtgtttaattgaatcagaattatttggttgttggtaggtttctggtttagaatagcaagtgtcaccctgatcaaagtagagtttttatgttttaagttggttgttgatgttaggcaaaggcgcaacccgttatgtttggacagagatcatcaattttaatttttagtgctgtcacttaatagggataggacataatgggcacacttttaaccttttaataccttaatttctttatatagaaaataagaatacactgcccttatttaggattacttaaaagttaagtatggtaccacatgcaatatttgattcaacatcaatagagccactaaatatctttggaacattatgtacaaatccttgtagtttgcaaagctacagaatcttacatggaaaatgtcatcttccattttattaatctcaagatagtaactcctttttaacctacagtcttgaattttattgaagataaaagaaatacatatagtccacgtttatgtaaagatacaattttagaggtaatcaatatataattgacttacaactttatttaaaaactgctagctgggcatggtggcacacgcctttaatcccagcacttgggaggcaggcaaatttctgagtttgaagccagcctggtctacagagtgagtttcaggacaaccagggctacatagagaaaccctgtcttgaaaaaaacaaaaaacaaaaacaaaaaacaaacaaacaaactgctatgatttctacaaagtagtatgggcctcatgtggcaatagtgtaactatttcttaagacattctgaaaatgttaaaggaaaaagtgatatccagtgaggctttcaatattctgtaacatttaataagggggaaagcatattatgtagaaggcaaaatccatattgttgctggtatcttgtgtacaaacactcttataacttttgtgcatgatttgttaacagaccagaaggcaaactgtaagcaattacttataattatataatatgttagttgatgatagttatgaatatttgctttcctttgtgcaaatgtagtaatccatttcagttgaagaattcaggaagagtttcctagtcaacattccacatgacttacttcaaaaaaagcgcataacttatataagtcggtaatagaaatagtgtgtttattttgagacatatcatattaaagaatgcagggcatacataagccaaagaccatggcataattttacataattcatataccatagagatatactttaaaaatattagaactaacaaagagaaattttaatatgttataaaatgtgtcttattgttttcagtggtatggatgcaatattcaaagactgccaattttttttttctgaaaaacctctgacacagagctagagaataatttattgttgaaataattctttttctgattttcagtagaatagcacatgagataatattgtagacacaaaagaatactttcatgttagaaagtacaagcaagaaaattaagggtcatttgagaagaagttagaaaacctagcacggtagaaacttactacacacacacacacacacacacacacacacacacacacacacacaaagataatttaaaagtgatagtcaaataagaggagagacagagccctgtatggacatcccttgtcaccaaatgaagcttccattcttggaaatgggctatatcttattgagtttttcaccaaaggggtcccatggaactgtactctaaacccaggctgttgcaaaaaatacgaattttttttctacaaactgatagcaagacttcattgcagtagttaacacctatccaattctttggaaatggagaagctgagcttgtggctacatagggccttcatccctacattcttgtatctttaggggaagaaggtattctgcatgctgctaaaagagaaatgtagacaggagcatactcttaaatctttcaatctacaatggtgttcttactgcaagatgtgttagtgcaatgatgacacaaagtttctgacaataaccaatcattatctcatttgaattaaggcccattccataagatgggactcattctgagacaaaataccccagagatttagggtaaaaacaaacaatgctattctactaaaagaacataggaagaaaatgactcctaatgacattctgttatactagtagaccattgtcttgtttagctagaagagttgggaacaatacagagacccacagccaaaacatatgaaaagaatgaaatgcattggaatactcaacactatgccagatgttcccactaaattcttcccctaaggtttcagggaacctgcagaagagaaggcagaaaacatctaagatccagaggggaaggaggacacataaaagaaaatgaaaagaagagaaaagaaaaaaaaaaacaacaacaaagaaaatgaaaccctgtaaatcaacatgatcagtatgtatatgaaccacagaaacagagccagcatacagaggacctcattggtatgcatcagatgtgattggtgagctaaaaggagaagaggacacattcttttatccataacccaggatccatctccaattgacaagcagctgaaaaacaaacaaacaaaaaacaaaaaaagaaaaacccactcatctagaaacaaactattcttaggaataggctgtatcaggtcttcttaaaaatctttaacaaaatatcagatttattattatttatatttttctctgaccatatcctacaagtaatttgtgtatattatagcttccaatttagtgtttttcttggattcctggatgggctagaacatatatatccagatctatatttgtttcttctgtctttcttgatccattttcattctgtttatttgtttgtttgctttatcctataaagatatactacattttattttctcattatattttaccatagttatatctcttaaaagtctgtttgtgccgggtgtggtagctcactcctttaatcacaacactcgggtgacagaggcaggcagatttctgagttctaggacaacctggtctacaaagtgagttccaggacagccagggctatacagagaaacgctgtcttgaaaaactaaccaagcaaccaagcaaccaaccaaccaagcaaccaacaacaacaagtctgtttgttttctagtgagaaacagaaagggattggatctgaatatgagagaggttgtggagggaatggaaggagaagagagagaagctgaaatcaagatatattatatgagagaaaaatccattttcagtaaaggaaaaaagaaaacagtgataggtgatgagggaccctgaagtttaatttcctcaaactttacaacaaggaactaacgatccctgctctggtctcataaggccactgtcaagatcatcgtcaaggtaatgatgataatctcccaagaacatatggaagtcttattgtgaaggagaagtaaaggagtaaatctgggcaatgaatgccatgcatgacactgagcatctttcagtaatgagccacaccatacccaggtactcaaggtccacgccccagtaaaaaatatactattgtggaacaaaagtaatatctacctggaacctcactttttgttgtgggtgagcaggttctctaaacatcccccaatttagaagagtctagggtgtcagaaacagacctctcatattctgccagttcttcttactttgccatggtgcctcagtagagagaatacggatagcattaaagttaaccagcaagaaaaatgaaagactgaagactgaaaacattgagaaaactacttagaaaaaactcacctaagaacttaaaaatcttgagaattagtacaaattcagatttagtgctctgcagctgaaattggtttttcttcttctctcctgtattctttgaactacaaattctagaatacttattctatcacaaataaattttacaacattatattgtgcataagttatcatcatattattattcaatgtgtttaacactgccatgtagctccttatatttaaaacaaatgaagtctctccttcatattaatgtagcatatatacttaatgcaagatgacaaaggtaaacaaacaaactgttgaatgcttgtaatgaacaataccgataaaaaattgtaacagtcattgaagatggattataaaaagcataatattaaaagcacttaaaaacattgaaagaagggcatatttgttggtttccaaagatatttagcatataataaaatttctaaacccaaataaacttttgatttacaaatacgacttatcaaactagtaagcacgtggaatttctataaacatacgttaaaaatactgctaatattgctaactgaaagagaaaaggtgggcaggaggaaaagaagaaaggatgatggtcattttatgcttattttatagttataaaatattttgtgatagattgcattgcatacttacaatttgtgttcattggaaataaaagtagaccatattgaatagtatttaagattattcacagcttccaagtctgaactttgaaattagaaaaataaaacatgctgcttttcaacaaggccagcctgatgaaaagtcagcataaccctgtgtgtatagaaaatgtacatacgtgggatgatttttcaatgtgacagctggagggaggaatctggtcaaaggctgacccctagcatatggcctcacaggtttcttgatatgcatacacaacacattcttggcaaagtcaagggtagaccggaaaatgactcattaagctctttgcagttgctgtgcttagatgtgtaccgcaagtctgcatcttgtgtatgccaacttatgctccaaccttcatataacaaaattcttccaaggaggcaaacaaaagctacatatgcaggggcaaagagctgagcctacagattgtacactcaacaggaatggaactgttccaacaacataacttttagaggaaaaaaaaatgtaattaacaataatattcctaagttggaattcctcctacacagactgtggctaagtagccttgtcaatgttctaatttgttatgtgtctttcaggtggagtatggtgttgtataatgctttatctacagcaagaaaatatttccatgcccaatataattttttagcatttaaacatttttatattgtctatcaagctaaatagcaaccaatttacaaaagtttatctgtggatttcttagcccatgctctgttgctggaatatagtagacaatatattagaaatacttttaaattatttgaattatgtaggaaataagttccttctgtttacaactttggaaataacacagtctgagaacattgttttagcaccctgtgagggcttaggccttacttcacctcagggcggaagacagagagactgtatacaaaacgaggtagcctcattttggataaacctgattatttgttgaccaacccaatcttgaaaaagctaaatacacttgtataaaagaatctaaacacgaaagaaacaagctaatctatattttaacctaatacttttatttatgctatgaaaggatcatatattaaacaacattattaacttatctattttcattacttcttgtctactaccctctgatatatccacctgtcactcaaatttacggattttctattgttatttttatcatcattattaacaatagacaagctaatctaattagttgtacttgggaataaatgtatagttattcactggctgttcaaagcctttcagtagttatatcaccacataaaggcacctctttatctctcagtacccatcaattgccaatagcactttagttactacaggggcctcagaagtcccttctatctatgctaaatcgtttaaatggcctgaactggggaaggtcttgtttaggctaccatatctgattcaagttatgatgtatatgagccatgtctgtacagagcagaatttttcttagcttccctcctaatcctctgattttgctaattcattactaatctagtaagttgtaaaggcttcacctcacaatattgccaccaaaacaagtttcaacaagaattctatagctcggacattgtatgagaactgtatcaatagtacagattagaattaataaaaagaaaatttcaatgtgctgaaatacatgtatttttagaatactaggttattttagttcatctattccaacttaactaatattttgtatagatttgagcactaaattgtagaaaatatgtttggctcttcatccaagatatcacacttgtttatatagcatattttctattttcttcattttctaactaattatagataaccctcaaatccctcacccaatctttatatccttttcatggttttcacatctaagtgcccagatagttgttttttgttttttgtgttttttgttttgttttgttttgttttgcctctttaaggcctacatcacagaacatttctaataacccgagataaaactttttcagcactaaactcaaggcaggggctaaccttaggaatagtccaattgtctaatatgcaccctggatttgaactttatctgcaataataaccatgtaactaaaactattttactcatttcagttcactgactatgctctgttactgttttctcacagcaggaatataaattccctaaaccataaatattgagctgtgttttaaaaactgttttttcttatttctgaacgttttcttccaagcttagtactacttttgttcaatggctaatgtcattatttcaattctcatgttctaatgtacattcattatccaaattattatattttctatccaacaggtccatcttgtccaggtgtgcatctctctcctctctctctctctctctctctctctctctctctctctctctctctctctctctctctctgcgtgtgtgtgtgtgtgtgtgtgtgtgtgtgtgtgtgtgtgtgtgtgtgatttgtgctggctcacgaacatttattaaattccatttctttcctcataccatcagtgagaccaccttactcttgttcctataacttctgtcaattttaaagctacaggtattttaaaccaatgattctcagcttttttagtccattttttgaacctactaaccaaatgcttagtgttttctaaatatctaatataattgttcaatttattttttcattttctcttttttttttcaaatgtaatgctttattgaatgaggagatcatccactcaccaagtgaacagaagaaaacaaaaagcaggcaaactaaatgtgctacagatattccgtggccatgcaagcaacttcctattgccatgtttattatcatagcaaaatagtatcagaagaccccactttatatggcatgtagtatatgtttctatttactatcttagattacaaggattcagtaaactgagagaaaggagtatcccaataatctagccatccttgatatttcctttggctcaagcacacatcattataaagagaggcccattggacttgcaaactttatatgccccagtacaggggaacaccagggccaaaaagggggagtgggtgggcaggggagtgggggtgggtggatatgggggacttttggtatagcattggaaatgtaaatgagctaaatacctaataaaaaatgaaaaaaaaatacagacaacacacacacaaaaaaaatatgtaaactgagagtactataagtgcatctgagcacttcagtgttttgtggatagtctagtaacattatcaagattggatattgagaaactaataagcaaacagcttgctatctctttataatgatctgtgcttgagtcattttctctttttaaactactaatgttttctccaacaaatgtaggaacttagaagtttagattataccatttacttttataaacaacaaataaaatacatgactaaaaatatgaacatatgaaaatctcattcatcctgagattttcttattaggatatctttattcactgtatttatttatttatttatttatttatttatttatttatggtttttcgagaaagagtttctctgtataggcctggctgtcctggaactcactttgtagaccaggctggcctcaaactcagaaatctgcctgcctctgcctcccaagtgctgggattaaaggtgtgcaccaccacgcctggcactagggcagttcttataaaggaaaacatttacttggggctggcttactgttttagagtgtccgtccattatactcatggtgggaagcatggcagtatccatggccctcaaagtcctgccaccacatatttttctctaatgtacactgtaaacattaaaattagtcttttattactgaagaagaaattgtattatattatatttattctcatctctaatttaatgcttgttgtaaatattccctcaacacaagtgtccttatagtaggaagacaaatgagtcccttctttaaactctttatgtcaaaatttctacctcacatgtaannnnnnnnnnnnnnnnnnnnnnnnnnnnnnnnnnnnnnnnnnnnnnnnnnnnnnnnnnnnnnnnnnnnnnnnnnnnnnnnnnnnnnnnnnnnnnnnnnnnnnnnnnnnnnnnnnnnnnnnnnnnnnnnnnnnnnnnnnnnnnnnnnnnnnnnnnnnnnnnnnnnnnnnnnnnnnnnnnnnnnnnnnnnnnnnnnnnnnnnnnnnnnnnnnnnnnnnnnnnnnnnnnnnnnnnnnnnnnnnnnnnnnnnnnnnnnnnnnnnnnnnnnnnnnnnnnnnnnnnnnnnnnnnnnnnnnnnnnnnnnnnnnnnnnnnnnnnnnnnnnnnnnnnnnnnnnnnnnnnnnnnnnnnnnnnnnnnnnnnnnnnnnnnnnnnnnnnnnnnnnnnnnnnnnnncctctttttctgtaaggacttctacctgtttgattgtgttttcctgtttttctttaaggacttgtaactctttagcagtgttctcctgtatttctttaagtgatttattaaagtccttcttgatgtcctctaccatcatcatgagatatgcttttaaatctaggtctaggttctcaggtgtgttggggttccctggactgggcgaagtgggtgtgctgggttctggtgatggtgagtggtcttggttcctgttagtaagattcctccggtttacctttcgccatctggtaatctctggagttagtagttttagttgactctgtttagagattgttcttctggtgattctgttaccgtctatcagcagacctgggagacagattctctcctctgagtttcagtgctcagagcactctctgctggcaagctctcttacagggaaggtgcgcagatatcttgtatttggacctcctcctggccgaagaagaaggcccaaaacaggacctttctcagagactgtgttgctttggcagttcccaggtggtacagactctcacctaagcagactaaactcctaagttccttggagtcccgggaccaagatggcgaccgctgctgctgtggcttaggccgcctcccctgccgggtgggcacctgtcctccggtccggaaggtggctggctgtccccggcccacacagggtgctgcctcagcccctctgtgcttctgcctgttccagaggctgtcaggttctctggcgcaccctctcacctgttcagactaatttcctaagttcggcgggtcccggaccaagatggcgaccgctgctgctgtggcttaggccgcctccccagccgggcgggcacctgtcctccggtccagacggtggctggctctctatttttctttaaatgctctattaaaaagttaacacacaaaggatggagaacaagttggttggaaaaaaagaaaagatagcaactttcacatctagctggtaaagttgactaactctaataaaagaaaaatgagcaacaggaaattttgatttccaggctgatgtctcttcttcttatgtttttctcctgacatcttttgctccctgttttaggacatgcaagaggatattaacacatagagagattttcataatggtgtagatgaagtttaatatgtgtaaatactttacagaaccccccaagtcacctgtgattaaatgcaaatatctgagctgcccttgagggtgtttacaaagaaaaaaaaagaataaataaaactgaattgttaatatatcttttagagcagtcagcactttcctctttcaccctgttaccccagccactgtgttctagatatacacttggaatagagtgttacattcccagtgtatgtcctaatacaatgaaaattgcttgtggaatctatgtctggtgtgcaaacctatttcttaatgtctctaataacactctgtagtgctgtgacttcacttaaggaattgaattagctgctgcattatctatgtcagttgggaactaattaaaatcttttcccagtgatgagactaggggttgaaaagttgaaggacataccattggatgataatgaggctcaaaattcacacacaagttttgtcattgctcataaatcttgcctgacactagtagaattcagctgttggaatcacagacttacatttatttctgggcaccatcgcttatcgtatccagacagaaatgtgttaattagcataacaacatagatttatagttatgtgataattataaaattgtagctgatttgactaaattcaaaaatctatccatatattgtcattgcaatgaatagaagacccttatcaatttaaaacttgtcaggtttttttttttttttaatgtccttttggtgtcagccgaaggtaacccttccttaaaagaaaaatcctgcatagtcaaattttcttcctgtcctttcctttcattccctctttttatagtcatgaatgttcttcttctcccctttcttctatataacttatcaaattctgaaaccaatactaaacatccatatacttttctgttccctttgccagtgtcctttacaaacacctcaagtgtcttttcctagtatctggctctattggtactttttataaaccatagcctacattattatagatgagaaccatcaactaaaatcactttacttaaactattatatacattgtcacaaaagatctggaaacattcaaaaaagtataatggggaaggaatattgggaggacttagagacttaaaacattcaacatagtcttcaaagaggttaccgtaagtacttgactagttatttcaggagacatggaattagattcctataatcaactgactcgtgttcaggagcttgtattatatatatatatatatatatatattaggtattttcttcatttacatttccaatgctattccaaaagtccctcacattctccacccccccacacttccctaaccacccatgtcaaaaacatttctaacccatgactattgctggttacatattgcaagaaattgatggtagaggcacagtagattttttttaacttgaattttcctggtctcttgactagttttatagcagggttttatatccttaaccatctctaggacaaagcgggatagttacataatgaccacttgccagatgctcacagattagacatgaggtgtgagaagcatcaatgttcctaagttttcaggaaattgaggcatcgctatgattaagtaaagtagcaaattcagacaagaatatgagggtaacatttttcagcagtgagtttgtttattttaactgattaaaatttttcttatttgagtaaaatgttacctcaaaatatctctctacattattcacaaaccaatgtttttcaaataattgttcctgcaaaggataatccagtttgcttttaattttctatcttcaagaatgtcagtttgaaaaacatttctagcccatttttataattgttttataactgaattacaaacaaatttatgtcaattctttgatttgaacatatatacttcttattgtttagattattagtgtcttagattactatgtatcttcaaagccagtgtagtatcaaaatttaaacatacaatggtcagtcatggaaataaatgtatagatgtaacactgtgcaagctgagctggttgtgtctatgtatttaggaatatacatacaaagatgcacttgtatacacacactacatggtggccaagagcttgaaggagaacacggagagttctccttcaaacagaaggagacatgacttaattttattataatctcaaaaaatattttcaaactcaaaatctgcatatcaatttcacacaaaatttcaacatcggtataaagagaacttagaagtgataagaaagattattatttacaaatgtagttaaattggctaatgataataacaataaaacagtgttcatgtagacacgaaagatttatgtgaaattattaaacattgagaaacctgggttgtatataagcatatttctaactttattattttgatagtgtatatttgccaatatttcaaactttaatatcatgtaagcaaaatcacctctgataacagtgtttttatggaatgaggatcatcaatactattaaagactgaataagcatattttgcttattggaagaaaatggttgtgcatcactaaagtgaaaactttgctttactggggcaataaattttagttagctggggtgacgaaatcagttgtaattagtaggagactagtctcattgcagtgaggtctactgagtcatatttgcttagagtcagccataaagcctacggtcctgagaagctgatctttacctgcagaaggtagtcaaacagtactgtaataatggctcatgtgctactagtttgggtggcataaaagatgaataattaaagtgatatttaaaagtacgttgaggtttggcactataatacgctaagtcagtgaaggtcatagaatatttgaaattctaagactgggatatctgccaaaggcagaggtaattgtggattgaaggcagtttgggcatcaaagataggatgtgtgtatgtatggcagaaagattgctgagtctatctaagctcttggaacctgcaaaaaataatattctattctgttgaggtttagttttgctttggtattgtcatttctgtgaccaaattcttccctgttggaataaaaaaatatgtaagctctttctttttatttttgcaggaacaatattgcagttaagaactctggatttttaagacagacattggattttaagctgttgaaattgttgaagactgtgaaatttataagataatattatgttttatattatgatatccacatggaattttggatataaacataaaggagttagaagtgcatgatgatgtttatattgtcaagttgacaaatgatcagttgtgtttcttaggttagtttagttaacttgacaccactagggtaatcaggaatgatggaaccccaattaaagatttctgccatcagactggcctgtgggcatgtctgtgggctatattacagatggacatgataggacctagcctactatgagtgctgccatcactggactgcaggcactcttgagttgaataagaaagcaggttgagcaaaccatggggagcaagatagtgaagaacacttctccatgctttctgcttcagtccttacatatagcttgtgacttagattctctccatgaggaattgtaacctttaacccacataaaatccttagcttccttagctcttttctatcagtgttttatcacagcaacagggaagcaatttaagctaactggattcattatgagaaaaatttcaaattttttaattaaataattttcctttttatagcaaaccaggaagtaaaataatatagcttttattataattgttaactatattgaaattatatcattttgaattatatctaagaatcaacataaaattcccagcttcatgtatgtattctattaataatttctaccataggaaatgcatgttacagaagttctgcctaagagatcattacagagtaactaccctaactcagactcctaaaattaatacatgtgtcaattgcctgctgaagtggaacaccctaacaagggtgccaaacatttcaacgatgcaattccaaatagtcatccacaaagtgcatgccgaagaacaatacgtttatgttacctcctcccccaaatattaaaatataccataatatattagactacatttatggttttgggttgagctgtactttcggatatcattagtgatttttgactggatttaaagattgaatttggagaactgtaattaatctcagtattttagttgtattcaattacatttaccattaccaaaagattaataaatatatatatatatatatatatatatatatatatgtgcccatgtggtgtgggccaaaaaataaaaaaatacataagtaaataaaaaagtgcagtaggcattgtcttattcattctcatctacctatctacctgaagtgaagatagttgtcattcgacttgaagcagaaattactactaatgtattgccatatggtttgctgtgcccagggattcagtattcaaggaagacctgacaaaatgttagtgtagtgtgaggaaaagtgtctgaaagtatatatgccaataacataattaaggaaagcagaaagtagttatttacagtgtaaaacgagaagctggtgcagaggaagaagcatcgcaggctgctgtgaggaagtatggtcagcaaagtccattttagggataaagaaaaaccagacatacaggcttctggctggaaattaagtgagtgtaaaggattgtagatcaataatgcaataaatgggacagaaggctaatggttcttttgtttcaaagtgtaaatggcatttttgtgttccactgtaaaccttaagtggtagcttttttaatcacagcacagaaagcctcgcattttgcctttcttatcacagattgatctgtttaactatgctttaatgtacatactctgtacttagcctcattgggtgttagataacaattttacctaaggactgggcatggagaggaccagtttgtcaaaacaatattgtcacctcagaagaatttaatatagtttaagaaaggaaaaaagcccagtgaataaatgtagtgaatatagataattatacatgaaagagaaacggaagcatttagactatgtattgaaagctcagcctgtgatgctcttaccctttctctgtctaggttcaagaactaaaagcccaatgccacagccataaacatgtcttttggtggtacctttgggcactgtccttggaatgtgtgaaagaattcttgataaatgttcacaggccaaatcagactgcaggagaggatttagtttttaaatgtgtcataataaactgatacattttgaacttttcataaagtgctgacagataagctgatgaggtggctcagtgggtaacggtacttggtggcaagcccaaagacttaaatttgatcactgggacctacacagtggaataagagaaagaactgttgactgtcttctgacttccacatctgtgctatggcgtaatgagtccatacatgccatgtgaatgtgtcttcatatatgcaactagatcaatgatttatacacacatacatgagagagagagagagagagagagagagagagagagagagagagagagagagagagagagagagaggtacagagagagagacagaatgcaaaattgaaaataaaggctgtttgatatgatagtgtttggctttggtgtcttacatgtatatgtatatagattctgcatgtcttactccctttcattttgcactttatttaccctttctctttcatgaaattttactggccatctgcatattcatttagcttccttgcattaaggaagaagaagaagaagaaaaaaagagactgcaacggggttttaggttgctatttctctgatttcatcaagtgttcttatactccattatatgtcataagtactcagtatgtaagtcgatttccaagaacagtctctaaatgccatttgttataatggtgtttaggaacaaggctttggtgatgaccctctgtatctattttatacatataaagtaggtcaaacagaaccacttaccctcttgtattcaattcatcattactgtggcactactctcttcttagtatcttctccttttcatattaagtattccttgtcctctgaaagtctcctgttaggaaattgctttatggtaatcacatctcttaccctcctgaagatctctgcatctttcagctacattcggcctttgtcatcttagaaattggatgagaataatggagtgcagtatgcaaaaagaaggcacccatttacattatatatttctgcatttttctttatgcatgtgtgtccaaaagaactgtagtgtcacaagtgatgcaaagtaatgccctctaggaaggtaattttacaatgtggagagtattagaagttattgagaggtggaaatgaatccacatggaagaaggtaccacaaatctagacaagaactttcatggtatcttttctaagatggatggatctttaaaaacaaattttagtgtcagcagattagaactagatgtagtcttagaaaagggatcttatgtaagccttatttgtacggatgaaaaaagctaagccactctgctctttaagaaagagtttgcagtgttcaactcaaaagtcttccgtcataaaaatattgaggacatatatgcaaatccatgatatattgaatagtcacttataataacagtcattttcatcatataattttatgtaattgactaaaagccttatagctaaggtaacagaaggaccaaagtggtagagatggtagagttcattttctatatgtttactattctatcacattgattctcctgtttgaaacatcttacttgattgtcatttgacttataaaccttagttttagtttagcaccttggaaaaataataataagtatgatatataatgatagctgaaaacatttagaaagtnnnnnnnnnnnnnnnnnnnntgtgtccaaaagaactgtagtgtcacaagtgatgcaaagtaatgccctctaggaaggtaattttacaatgtggagagtattagaagttattgagaggtggaaatgaatcccacatggaagaaggtaccacaaatctagacaagaactttcatggtatcttttctaagatggatggatctttaaaaacaaattttagtgtcagcagattagaactagatgtagtcttagaaaagggatcttatgtaagccttatttgtacggatgaaaaaagctaagccactctgctctttaagaaagagtttgcagtgttcaactcaaaagtcttccgtcataaaaatattgaggacatatatgcaaatccatgatatattgaatagtcacttataataacagtcattttcatcatataattttatgtaattgactaaaagccttatagctaaggtaacagaaggaccaaagtggttgagaagttagagtttattttctatatgtttactattctatcacattgattctcctgtttgaaacatcttacttgattgtcacttgacttataaaccttagttttagtttagcaccttggaaaaataataataagtatgatatataatgatagctgaaaacatttagaaagtatctttcttttctgtatatactatggataattataaccaagtcattcatttcacattttaaaacattatcagtttcaaacatgaaaataagtttagaaatattaacattgttatcaaatattatgaaattaatatatagctgaaacatgtctcacatctatgcatttttgctagcttatcttttccaacctgctatatgataacaatatgtcattgaaacatatcttgatgtgattgtaaaatagtattattctctctctcactctctctctttctctctctctctctctctctctctctctctgtgtgtgtgtgtgtgtgtgtttgtgtgtgtatgtgtgtaatagttccatttaaaattacaaggattttcatctgataataagttgaagcaaagatatagaagagctctacaatgattactatagctacttgatatgagaaaaagaataaaaattaattttcaaaagaaataattatgttcatggaaaaatcagtattttaaaatgtttaacaactaaaaaaataaataatctataaattcatagaaatgtctatctaactacaaatgaatttttcagaaaattggtttaaaaattagtcttaaagttttcattgatccaccaaacacttggtaaccagtgcaatattaaggaagtttaccaggagaacaaactataaagaagtataaattacaccacaatgtatatttggctaccaagacttcatggtattagcagatcagataaatgtagcacaaaatagagtccaggagtcacatcacttgcaaggtcaattgatttatagcatattttccagggacataagttcaagaaagttatttctagaaacaatacaaggacaattgtatatcaagggactaaaaaaatgaaacatttctctgttctacaccatctcaaaatgttttaaataaaaaaaaacataatagctaaacaaaaatataggaaaacttatggcttttaaaaagtaagaaaaagataagaaccaaagcttcagaaaacaaaagtaaactagagaagaaggacataatttgcaatctcccatgccacaaagaaacagaataataacaatacaaatgcacattgcataaaaatatatgcatacttaatcatggacaaaaatgtgaacgactttttttacgattactaatgaaagaaattcagatcacagcactgatgggagttcacaccactaaatcctaccatggaaaagagcaaatagtcaacaaaattttagagaaaagagacaagcttgcacactaccagtaaaaatataaattagtatttccattattagaaatagtttggaattatcttaaatatataaaaacaaatgctgcagattctgcagtccaacaaatcagtgtgcgaaaacacaggaattgaaagctgtgtgttaagcagcctccacgatttctatgttcactgaagaaccatttccaaggaaataaactgaaacaatctaaagtgtgtgtcagttaataaatatataatgcaaacattatataataaataaaaagggataaatttcatagatttaaaaaaaatagaatgaaccctgtcttgtgtaacaatatggagcggcctgaggtttattgtgtttagtaaatcaagcagtgcacataagcgataaccacagaacctcagtaatatataaccttattaattttaaattgatggtacaaaagttaagtatgtaatgtgtacaaattggagtttatgggtcattaaaataataagtagacacaaacttgggtgtgtgggtagggaagaacctgggaggagttaaggggagaatttttgataaataggataaagatacatagtatgatgttcataaggtactcataaaatattttttaaaagcaacaccaataggaaacagtatattggtgttacatgaatatgaggagctgtaggttgaagactggagaaaaatgtatcaatctgtactggagatgtataggatttctggccttgggattctacagaaagagaaaaagatataaggatgataccattcatatcaaaaggttaggctaaaggtttatctatcttgttgattttctcaaagaaccaactactcgtttggttaattctttgaatagttcttcttgtttccacttggttgatttcacccctgagtttgattatttcctgccgtctactcctcttgggtgaatttgcttcctttttttctagagcttttagatgtgttgtcaagctgctagtatgtgctctctcccgtttcttcttggaggcactcagagctatgagtttccctcttagaaatcctttcattgtgtcccaaaggtttgggtacgttgtggcttcattttcattaaactctaaaaagtctttaatttctttctttattccttccttgaccaaggtatcattgagaagagtgttgttcagtttccacgtgagtgttggctttctattatttttttttttttgttattgaagatcagccttagggcctggtgatctgataggatacatgggacaatttcaatatttttgaatctgttgaggcctgttttgtgacctattatgtggtcaattttggagaaggtaccatgaggtgctgagaagaaggtatatctttttgttttaggataaaatgttctgtagatatctgtcagatccatttgtttcatcacttctgttagtttcagtgtgtccctgtttagtttctgtgtccatgatctgtccattggtgaaagtggtgtgttgaagtctcccactattattgtgtgaggtgcaatgtgtgctttgagctttactaaagtttctttaatgaatgtggctgcccttgtatttggagcatagatattcagaattgagagnnnnnnnnnnnnnnnnnnnnnnnnnnnnnnnnnnnnnnnnnnnnnnnnnnnnnnnnnnnnnnnnnnnnnnnnnnnnnnnnnnnnnnnnnnnnnnnnnnnnnnnnnnnnnnnnnnnnnnnnnnnnnnnnnnnnnnnnnnnnnnnnnnnnnnnnnnnnnnnnnnnnnnnnnnnnnnnnnnnnnnnnnnnnnnnnnnnnnnnnnnnnnnnnnnnnnnnnnnnnnnnnnnnnnnnnnnnnnnnnnnnnnnnnnnnnnnnnnnnnnnnnnnnnnnnnnnnnnnnnnnnnnnnnnnnnnnnnnnnnnnnnnnnnnnnnnnnnnnnncttgtattctgttgctgatgctcaaatctatggttccagatttctttcctagggtttctatctccagtgttgcctcattttgagttttctttattgtgtctacttccctttttaggtctagtatggttttttcatttccatcacctgtttgtatgttttttcctctttttctgtaaggacttctacctgtttgattgtgttttcctgtttttctctaaggacttgtaactctttagcagtgttctcctgtatttctttaagtgatttattaaagtccttcttgatgtcctctaccatcatcatgagatatgcttttaaatctaggtctaggttttcaggtgtgttggggtgtcctgggctggacgaagtgggagtgctgggttctgatgatggtgagtggtcttggttcctgttagtaagattcctacatttacctttcgccatctggtaatctctggagttagtagttatagttgactctgtttagagattgttcttctggtgattctgttactgtctatcagcagacctgggagacagattctctcctctgagtttcagtgctcagagcactctctgctggcaagctctcttacagggaaggtgcgcagataacttgtttttggacctcctcctggccgaagaagaaggcccaaaacagggcctttctcagaagctgtgttgctttggcagttcccagaagctgtcagcttctgtggtgcagactctcacctatgcagactaaattcctaagttccagggagtcccggaatcaagatggcgaccgctgctgctgaggctgaggccgcctcccaagccaggcggacacctgtcctctggtccggatggtggccagctgtctgcagcccccaagggtgctgtctcagcggctctgtgcttctgcctgtcccagaagctgtccggttctctggcgcaccctctcacctgttcagactaatttcctaagttctgctgagacccggaaccaagatggcaaccaatgctgctgaggctgaggctgcctcccaagccagtctttaatttatcagggtcctttagagtaatataacttatagaatgaaatgcatatatctgtgcatgctatttgaggggtagagggcacccgagggataaagggagtgggataaaacacgcatccaaccagatttcctgtgctctgggtgagcagacatggaaggactgccacatgctttccatgtggcccacgtgggtgcctggctgtgtgaagccacataatctcagctcgctgggggatggacaaggggcagccctaagtaccatattctcagccttgggcatcccatgctaaataccaccgaagagctaagaacagaatgccctcccccccccccatgcagctcaggcagcttggtcagccccagggtaggagggaggagagggcaagaagagagggcactaggtggttcccacagacagtctttggtccggtccatggctgcaacacaggaaggccatctggtgggaggttagatgtggctcattaggagaaggcctatcccttctttcaagcaaggtggccttgataagcagagacagtctatgatttagagctttattgtggaaagtcagagaaaaagagagaagatagaaagagagagagaattcatcttggtagattttacctttgatgagtatgaagtgcccctttttgtctggaatgccagggtaaagaagtgggagtgggtgggtatgagtgcagggcgggggggagggtacagggaactttcaggatagcatttgaaatgtaaataaagaaaatatctaataaaaacctttagctagactcactagagggcacagggacaaaatcctaactaacaaaatcagaactgaaaagggagacataacaacagatcctgaagaaatccaaaacaccatcagatccttctacaaaaggctatactcaacaaaactggaaaannnnnnnnnnnnnnnnnnnngggggagtgggtggttaggggagtgggggtgggtgggtatgggggacttttggtataacattggaaatgtaaatgagctaaatacctaatagaaaaaaaaaggaaaaaaaaagaaagttactttcatacaataaaaaaaaattaaaaggaaaaaaaaaaagaaaaaaaaggtaaaaaaaaaaaaaggttaggctaaagaccttttttcctaccatgaaaatgtcataattatttgagaagataaatggttattctgatttaaatactatgtgtatgcatttatcaaaagtattcttgaaccctcaaatgtataccattcattgtttaatatattaattggtgcaaattcaactgaaactttcagacaaatataattttaaagtaatgtaaataaaaagtggagggaccagaaacaagagaaaaatgatgcataattaagcagagagaggctttttcacagttagctgtcttaagctccatgccagtcagtccctgtcatttcaggattatgatgggagaagacaggatggactgtttgacaatggttgtactttggtgaaatgacaccattttgaaacagacagatatgatgcatgtgaagattgtgactctactagataaccctgaacttattcctttgaaatagttcaaatttccccttcccaaagtaaagcacaaaataaaatacgtgtaaacattctattcagtaatgcattattcaagatttatttggtggaagtcataatttattgtccatatttcttcaacaatagagttatctttttggaaatattatgatttcattataccttgctaaagtggcaacaatagtgcgaattattacacattttccttgacacatttttatgtttttctaatatgcttttaattatcttttagtggattttattccacatttgtagatagatagtggatagaaagacagacacagagagacataaatatatgatagattaatagattatagatagatgatacatgatatgcatgatggatagatagacactgggcactattttagcttgaatattttgaatgttatttttctcttttctgttgctattttttcaatggttattcttatacagataacatacattcagtgagattagctctttatgtaacatgatttgcccagatcattctaagagcctctgaacagatgggatgggtttaaatataagaagcagtagcctcatatcacctccttgcagtgctacttggaagaaactcaagaaaaatcaatatctaaacacaaaatatatactcacacacattttgctgaataatgaaactcctcacatacatggttttatatatgtgcaaaatatatgtatttagatggnnnnnnnnnnnnnnnnnnnncagtagcctcatatcacctccttgcagtgctacttggaagaaactcaaggaaaaatcaatatctaaacacaaaatatatactcacacacattttgctgaataatgaaactcctcacatacatggttttatatatgtgcaaaatatatgtatttagatggagaaaaaaatttttagattcttaaaattttactagagagtatctttacttaattttgaggcaagattttctggccagtaaccagtgcaaaatatgatataaaaatatataatataatatataaaatatgcaaaatataatattaaatattcatatgaaatatgaatatttattgaaacatgaacattatattttttaaatttttaggatctctgacaagtggaggataccaggcaacatccctacacacatacaaacacacacacacacaaagtaacaaaacttgaatttgattagactagactccatatttttatctgtggataggtaccaggtatacatacattttcctactggctctatttccacgttttgcagatacttaaattatgcatcccataaaacaagtacctcaatgttcattacaatgcatcaaacttgcttttataccctgtacatagtatgacagacaagcagagtataatgaagtgtatctaacctggattacccagcattgggatgaataattttatgaaacacactgatctgtgggatcaaagatacaatgtattatgatgtaccattaatgatggttaattacaagtttaaactcttgattgttaaacagacatgttgggttattttattgtggaaagtggtatcactgtgatttctaatacatggtataatgtagactatgccaaaatatcctcatgcaaacttggatgattgttccaggtgtatagtactcactgtacaagcatgggaatctaaactcatatcctggactcatgtaagtcccatggtattgtgcacatggtaatccaatgtttgttaattgaaatgtgaggcaaattatagagaatccctggtagctgattggtcagcaggcctggcatatatagaaacaataaacaaatatccttgtttcaaacactgtgaaaggtaaggatcaacactgagattgccctctgacctacacatgagtgccatgatacatagactactgggtctgggttcagtcagagaagatgcacctaaccctcaagagtctggaggccccagggagtttagaggtctggtggtgtggagatgtggggtggggacatcctcttggagacagtggggcagggaacaggtatgggatgcagaaaagttggagggtggactgggaagggaatgaaacctggagtgaaaaaagaaagaaagaaagaaagaaaaagaaatgaattaaaaattttaaagagtagtttataaaaatccaaaagacttgtatctagtgtatatacaggattctatcaaaaattgaggaggagccaggaatgggggttcatgcctttaatcccagcactctggaggcagaggcaggtggatttctgagtttgacgccagcctggtctacaaagtgagttccaggacagccagggctatacagagaaaccctgtctcaaaaaaataaaacaaaacaaaataaagcaaaacaaaacaaaaacaaaaaccaaaacaaaaattgaggatggataaaattcgtttcttgtaaaaatattttaaaacagtactcaatgaaattgtatctaatacatatatacagaacactttcaattcaaaagcaaaatgttaaattaccaaatgcgtgtgtgtaggatctgtcagtttatagaatagagtaaatatgcatatataaataagtaaataaataaataaatatatatatatatatatatatatatatatatactatacatctattatatataaatccataaaatagattgtatatatatattatggatttatatataatctattttatggatatatatgtacatatatataaaacaagctaatacatatgtattatacataatgcatacatattacacctatatttcataatacatatatgtgagtatatgcatatataagcacactaaacaagatagccaaaatgtttgtgaaattagcaagcatttttatccatcatgtatgtacaaattacaattataaaatatactgttaatcacctaagagaatgaaatcattaaaaattaagacctgacattcagaagtatttatgagaatgctaaacaatgttaatagaaacacagatgttggccattttttaaaataagtggatcagtttattacagtatgaaatatctgctaacatcacatgtgaatatcagacatagttatttccagaaaagttttaatatgcaagtatagatttatgtaaagtatctgcttaaacctctcacacataaaaaatctaaaaaattaatctacagattaatggaaaaacaaattttattaaatcctacagtagataattttgtttcttaagtcttttcttacagtttctataatatggagtatttataagtaaaagaaacaagcatctactacatgcaataatgcaaatgaatttcaaaataattttgctgaaggaaaaccaccaaatataaaaggaactaagctttgcaatttcatgcatatggagttaacgaaaatgtaaattcattctccctgacaaacacagcaggccagtaattgcctagagccaaaatgagtaggtaatattctacaaaagtttgtgaaccttaggtatgcttgattgtttcatgagtttgaaaagcaatctgtatcttgattctgttaggcatcatgtgactatgtgtatctatcaaaccatggcaacctacacatacaaatgcttgtgttttagtgatgtaaacatcacgtcttgataaacctagtttaagtaatacaaatgtattagcatcaagtcaatgaagaaagaaaagacaatttttcattccttagtgaagcattttttttttgctagtaaaatacagtgactcaatttgaacagtgcctttaattttattaattggtatttgaaaaaaaaagaaacaaccaaannnnnnnnnnnnnnnnnnnnggagaaaaaaaattttagattcttaaaattttactagagagtatctttacttaattttgaggcaagattttttggccagtaaccagtgcaaaatatgatatacatatatataatataatatacaaaatatgcaaaatatgatattaaatattcatataaaatatgaatatttattgaaacatgaacattatatttttaaaatttttagggtctctgacaagtggaggataccaggcaacgtccctacacacatacaaacacacacacacacaaagtaacaaaacttaaatttgattagactagactccatatttttatctgtggataggtaccaggtatatatacattttcctactggctctatttccacgttttgcagatacttaaattatgtatcccataaaaaaagtacctcagtgttcattacaatgcatcaaacttgctcttataccctgtacatagtatgacagacaagcagagtataatgaattgtatctaacctggattacccagcattgggatgaataattttatgaaacacactgatatgtgggatcaaagatacaatgtattatgatgtaccattaatgatggttaattacaagtttaaactcttgattattaaacagacgtgttgggttattttattgtggaaagtggtatcactgtgatttctaatacatggtataatgtagactatgccaaaatatcctcatgcaaacttggatgattgttccaggtgtatagtgctcactgtacaagcatgggaatctaaactcatatcctggactcatgtaagtcccatggtattgtgtacatggtaatccaaagtttgttaaatgaaatgtgaggcaaattatagagaatccctggtagctgattggtcagcaggcctggcatatatagaaacaataaacaaatattcttgtttcaaacactgtgaaaggtaaggatcaacacggagattgccctctgaccttcacatgagtgacatgatacatagactactgggtctgggttcagtcagagaagatgcacctaaccctcaagaatctggaggccccagggagtttagaggtctggtggtgtggagatgtggggtggggaaatcctcttggagacagtggggcagggaacaggtatgggatgcagaaaagttggagggtggactgggaagggaatgaaacctggagtgaaaaaaaaaaaaaaaagaaagaaagaaagaaaaaaaaagaaatgaatttaaaattttaaagagtagtttaaaaaaaatccaaaagacttgtatctagtgtatatacaggattctatcaaaaattgaggaggagccaggtatgggggtgcatgcctttaatcccagcactctggaggcagaggcaggtggatttctgagtttgacgccagcctggtctacaaagtgagttccaggacagccagggctatacagagaaaccctgtctcgaaaaaataaaacaaaacaaaataaagcaaaacaaaacaaaaacaaaaaacagaacacaaattgaggagggataaaattggtttcttgtaaaaatattttaaaacagtactcaataaaattgtatctaatacatatatacagaacactttcaattcaaaagcaaaatgttaaattaccaaatgcgtgtgtgtaggatttgtcagtttatagaatagagtaaatatgcatatatatatatatatatatatatatatatatatatatgatacatctattatatataaatccataaaatagattatatatatataatgggtttatatgtaatctattttatggatacatatatgtacatatatatatatataaaacaagataatacatatgtattatacataatgcatacatattacacctatatttcataatacatatatgtgagtatatgcatatataagcacactaaacaagatagccaaaatgtttgtgaaattagcaagcatttttatccatcatgtatgtacaaattacaattataaaatatgctattaatcacctaagagaatgaaatcattaaaaattaagacctgacaatcagaagtatttatgagaatgctaaacaatgttaatagaaacacagatgttggccattttttaaaataagtggatcagtttattacagtatgaaatatctgctaacattacatgtgaatatcagacatacttatttccagaaaagatttaatatgcacgtatagatttatgtaaagtatctgcttaaacctctcacacataaaaaactaaaaaattaatccacagattaatggaaaaacaaattttattaagtcctacagtagatagttttgtttcttaagtcttttcttacagtttctataatatggagtatttatcagtaaaagaaacaagcatctactacatgcaataatgcaaatgaatttcaaaataattttgctgaaggaaaaccaccaaatataaaaggaactaagccttgcaatttcatgcatatggagttaaagaaaatgtaaattcattctccctggcaaacacagcaggccagtaattgcctagagccaaaatgagtaggtaatattctacaaaagtttgtgaaccttaggtatgcttgattgtttcatgagtttgaaaaaccatctgtatcttgattctgttaggcatcatgggactatgtgtatctatcaaaccatggcaacctacacatacaaatgcttgtgttttagtgatgtaaacatcacgtctcgataaacctagtttaagtaatacaaatgtattagcatcaagtcaatgaagaaagaaaagacaatttttcattccttagtgaagcattttttttttgctagtaaaatacagtgactcaatttgaacagtgcctttaattttattaattgttatttgaaaaaaaaagaaacaaccaaaagattcttttccttagaatagactactagtagagaacatttcttttttttattagatattttcttcatttacattttaaatgctatcccctttcctattttcctctctgaaagtcccctataccctccccctaacctgctccccaacccacccactcctgcttcctggccctggcattccactgtactggggtatataatctttgcaaagccatgggtctctcctccaattgatggctgactaggccatcttttgctatatatgcaactagagacaaaagctctggggggtactggttagttcatattgttgttcctcctatagggttgcagacccctttttagctccttgggtactttctgctccttcattgggggcccaagacaaaagtttgttcatcaagaacatttttaaatcattttttaaattctccagtgatggctgtagaatagaatgaagtagaagcaacatagttgtctgactgtcccatctcttaatcatgtctttgttagctccgtattctacacaatacaaaaacggtgtctgggatatatctgcttgctacactgagtaagcagacagtcaacatcagtagaaggaataatgtccttgtaattcatttgcacaagttaaaccaaattgatgtaattttgtggactttgtccaggaactcaatattgtggattagatctctcaggtttgctgtattactgtgacatccaggtttattctttctgaaacaaacactgcaggaaagcgatggtttatacttacaaaggtttatgttacagctagtctattagattgtttttacccaatgcagagcattgtgggcatgctgtaaagtatgagaacataccattggtaacaagtatcagggaaagtttcgacagagtaggattatatgttcatttctttccccttcctataactgcataaagaataggtaaactcaaaataatgccctgaaaagtgtcctagagtacatttaatccagaaactcctagtgagtgtccactcctgttactctgaccaccataatctcctaagtaccttattgtacatacctaagactgtaatgaagttgtcagatatcaatagcagatcaaaaatagcacatttcagacttcaaggaccccctggtccttcaataccattttttttttttttttttttttttttttttggttttggttttggttttggtttttcgagacagggtttctctgtgtagccctggctgtcctggaactcactttgtagaccaggctggcctcaaagtcattaatccacctgcccctgtctccctagtgctgggattacaggcatgtgccaccatgcctggctgagaattctaattcttaatccacaaaagattatttcaatgtgaaactgtgtcagtgagaaatactatgaaaaataaaaacatgatattattttatgatacttcaccttgaaatgttacagctgacaggctatcatgcacacagaaatttaaaatgttcactagaatcaggctgtgatgaaaatgtaacaaatttctacatggaaaataactagtgagttcttctgcatgccaactcaataccttatgtctctaagacgctctgtaaaatctgatcagtttgctgtttagatattgagatctagagctgtagtttcttttagaagttcacgtgtaaccaatttcaatatggattttggcatcctgcttcagtcacaggaaggctgatgctacatgtgagatatccgacacagcctcttcatatgtcataggagaaaactggtcacccagctttctcagtgtgaagcatctaaccataagcttgttatgctgcagcaagtacagcaaataattactatgcatttaatcgtacaaaaatggggatactgtctctattatctctgcatttttaaagaagacaataaaagtgttagatcataacatatgttgccatgcacacatcaaatttagaccaggggcttcctgctatagaaaatttgggtagaagagacattttaaaaaatttcccctcctggaccaccatttgattgttacacatcccattcctggtccccactttctccacaaggatatcaccattccccactccccaaactgccccactccctggggcttcagtctcttgagggttaggtgtaccttctttgactgaacccagattaggcagtcctcatataacatattgttgcccacatggcctatgaattctattgagtttttgttacaaaatatccccctctcatcctgattatttctatcacttttggcatgatgaatgacatgaataactcaaaatagtaaatgacacaaaaaatagtcttcagtagctctgatatttattacattaagcagtaatacatttttaagctccagttaatgatactaaaattaattgttctataagaaaaatatggcttatgacttcagcaagccagtaaactttgctttgttaaagcaccaatcaatatttagagggattaatatggtgtctgtgtcaactatagttcctccattattgactgttcatagaaataagcagttacagaaattctgtggatccctgcgtgcatgtgcctcccattcccctccccccactataatgaaagctattttccattatctgtaaaattgaagtgtcctaagtgtttcacattcagggaatatgttttctttcagttttagcaatcattagtaaaatgagcaaacaaaaatagtttacaggttttacaaatcaggtagcaccttataattcatgcgtgtgttcctgacagctatgattatggcaagcaaaacaacttagagaatcccaagaaaagacttcattaactctttttaattttttttattgcttattttgtttatttacatttcaaatgttatctcccttcccgatttactctctgaaaaccccctatcatatcccttcttccacaagagtacttccccacccaattgcccactcctgccccactgccctagtattcctctacactggggcatcaagccttcacaggatcaaagtcctctcctgtctttgatgccaaacaaggccattatctgctacatatgcagctagagccatgggtcactccatgtatattctttggttggtggtttagtacctggaagctctggggtgtctggttggttgatttgttcttcctaagggattgcaaaaccctttacctccttcagttattcccccaactcctccagtggagtccccctgctcagtccaatggttggctgcaagcatttgcatctgttttagtaaggctcttgcagagcctctcagaagacatccatatcagactcctgtcagcaagcacttcttgacatcagcaatggtgactgtatatgggatggatctccagatggggcagtctctggatggcctttccttcagattctgctccaatctttgtccctgtatgtcctttagacaggaacagttctgggatagaattttgagaagagtgggtgaacccatccctcaaccgggacagcgccttacctctggatatggcatatccagtttctctctcccctttgttgggtattttagctaatgtcacctcgttgggtcctgggagactcttgcttttctggtgtctagtacttcctgaaggcttcctttttatcaatgaatcacttgaagtatgagacttcatagtcacttactctctacatgactacacttgaatctatgcgagactttccatcttttgcagaaagaagctgacttaatgttgaataagatattcttatctatgatggatagataaatatttatgaacacaaatttatattcctataggaaaattgcagaacttaattcccctttagggtctatgacctctcttgccaagatagtgtgataggtttacaaaactctcatatgagttacctactatggagcatatcttacttccaattggacagctattgtgacaagactgaagttctactatcatattttgaagatattttgccctgtcaatcattgtggttcattggtttgctgctgagtaatattctttactgcttttactccaggtcaagttgaatggcaccttctgaaaaaactcaatggtacctattggctcaagatttcaaaaagccaaaccacagaaactaaaaataagcagagttacccaaatgttgtggcaggctcagtttgagttttccttctacaatatttattctctgttctctgtgtctcattctattgactcgtccacagaatcctcataactattttacttttcttccatcagctgttttattacatcatagagagccaccacactcttttaaagcaggccagggcttctcacagcaagtgcactatttaaaaatatcactcactaatatattagtccaagtaaaacaacaacaaatcagaaaaaaaacatcaggcttttcttttcttctttggctttttatttttgtgttttaaattatataacctatttctccagtaaatgaaggtattaatttccctaaagccctaaatcaaaaatctaattgttacagaccataattgctatccaaatggcaagactataagacctcaagtaatcccttgatttgttaatgtataaatctagagactctcaaagacttggagtcattgataaggtcaaccattggtagcagacataatttttaaaagccagtaactcaatagaacatagctccttggaggcaaggatattgtgtaatttatcttccgctccagcacatcttagcatagtatagaatagaaatgatgcccaggaaatagtgaatgatgctggctatctcacttcacagtagcagtttgtaggaaatatattctcctacataaacctcggaaacatcccagcattaaaacagaattcattgtcattctccagatgtcattgtcagtgctcaatgcatccctactctcagaggactgaggtataaaacatttaatgcttcagagtgcggaaaacagcaacaacaaaaatatagcagtggatgttttatcctctagaaagcagatatttctgtcttcagcttctgaacctagtagctctcacgtggaatgttgtgatcagttgatgttctacaggtgtggtattatcattctgaaaggaataattctttggagcagtttttcagattacaggatattcagtatcctttgaccctattttccagtggttataagatctcctgtcaggcaattgtgaaaaactaaccaaaagtttggtgtgaaacaaaagaaaatatctatcagaaaaacatagccatcttgaaaaaaagaagcaagagttatggacgccaatgcaagcatacacacacacacacacacacacgcacacacacaatcaatcaatttgactcagctgtctaatttgagcagcataaagaaaatagaaaaataaatagccacggaaaaatatcttagcattttcctttatttgccacaggaaatatatcagttgcataaacaacaaatatcactttttgttttggagaaatttgttagtttgtcttcagacttttcagtagtaactcctgaaaaaaaaaagggtctctgtgttaggaatgaatcagtggtatttgcaaatgcattcctaaggcaagtacatggcagaaagaatctaagggaagaatcattaatgttggctcatagtttgaaaacactcagtccacaatggcagtgaagatatgacaggtcatggaggagatgaagcagaatgaggaggaagctgatattcccctggtttcctcctttctctctcctttttattgtgtccagagtctacagctaatggaatgatgttacccatactcacaataaggttttgaccctcttttaactcactcttgatgtatcttcgctaacattctcagagcctatctttctaaagtcctatgtaatgcttacttccgctaagttgacaataaacaatagcatgcttgttaactcaaagcatactaaatgagagatagtatgaaaaagtgtatccacctattttccactctgattcctaaatatttgccaagaagacatgaaacagttttaaggaaaaggagacaaaatagtggtgttcacttttattttattattattatttttttttagctctgactctagctaaggcattaagttagccataacactttaaaaggaacaacttcaaatagcactaggtagaacaaaatgagtgaaagaaaacagctatatcttgtttcgttgacatgagagggaagagagaaagagtgcatatgtgcaaagttcatgagttcatcatttatacaaacaaaaagaaatagtcactacattttaacaacgaaagatatcacatgagacaatttccactgttgcgattcaactgcaatggactcttaaactaagatggaaacctttacagagtcatgtaaaataacagacagaagacatggccaggaagacaggtgagatagtttgtgttcattcatgtgcaaattgtttgcgtgggaaaaggtgattttattttatgttgaggaatgatgctgatgaaaatgtatttaagatagtgcatcacaaaggggtttcactacttagccaaaaaacaaagccaacactttccttttaaaaatataaggcagactatttatcagaagcccactgcagaagtattaactataacaaacacatgaggtagtaaggtagcatataccaggtagagcctctaaaactaatgattttctacttatccaagagctcatgaatatggtatttgtaaattctccctctgcaagagcagctactaggatattggttctgaagatttttttggaaacctgacatacagagtttactgtagattgtactccaatattcagttaaggtaacaaaatgtttcattgtagctgtactaaagggtatgcttttgccaaagaactgttttaattagcatagcaatagactctctgaaagaatagtatagtaagtgtggctggttcttgaatataatacatacccttatgtatatattcatttctgaaaatggtactgtaatattctccagaaaataagcctttaaataccaagaaggtagtatttttgtcacaatactggacctggaagtccaggtcccagtagccattctctaaataacagaaggtctctctgctttatctacaaatattttcttcttatctgtaaaccactaagattgtatttgaaaaaccactgtaatggctgttttttttttttacattatttagttctatactagatctatcttcagtcacttttttaaatgcttggttggaactaaaacacagggactggtgatggttgcaatttacttttgggatagcattggaaatgtggttgaggaaaataggtaataaaaatattaaaaaaacaaattatttttaaattgttcctggtttgttggtttttttaaaattttgcatggccatcactagcctcaatgtaacagtttcctcattgaaactatgcacactgagggtagagaggtctgtgttatcaggagctcttgtctgttgtatagagtctcgaggcttgtactcagtgaaagtcagttgtggtccacatatttctacttgaaaatgcccattgatattgaaaaatattcccaaataatagcctcataagttagggggtaatttatgttgaattagtgagtgtgttgagaatggagttgatcatgattctgtttattaaaaacctatgatctttagccataggctgtgtgtattttgcatcctgcctctatcattgtattgttctgaacaggcttcttcccctttgtgtgacttgcttttaataccttaaaaatgtcatcactttcttaaatatttaataggtaaacaaagcttgattcagtagacctttattggtgagagacctttctttttatagcaaaggcattagccataatgcttataattaaaattctaaaattgttgataaagtttttctgatagtaagaggttataaagatttattgtggtaaagagctgagttgaattcctccctgcaaattcaaaatgatcattgagcacaatgctttaatggaattgatgtcaggatgggaaataaatttcctgaatcagttgacaactttttaagaataaataagcattcatactttcctaagaatcatagtttttaatcacgttcaccaagggactcataaaataccaaaaatagtagaagtaaaacttcacaaacattaaagaataagggaacacatgaatataaaatcccaaggcaagtctttggggggaaaatgtaagaatgataaactgtactaagaaaggaactaaagcacaaatatataaaataaacaaaaaaacaaggcaattaatataaaaggcaaggcaattaaaaactaactcctaagagattgctttattagcatatacattaataaatgtatgctaatcctatactgatcatgtgtaccaataaatcatataattatacactaataaaaatattgacaatcagagggaccatgatgctttttgttccccttcaccatacctctgacagtgttgggaaaactgacctattatcctgtgactgcagcctcgaagtccacataagataaaaacagaactacatcccttcaatgtaagatcttacagccactttatagattatgaccttgaagaagtaagttttaatgagccctagagttgaaatacttattaacatgaatgatcagcatgttcatctttttatccctatcttattaaatgtttatctttttaaagaaaacgcagtttatgaaggccttcctaaaacacacaaactgaataacagttaaagaaaacattatactttgcggaatggtgtagaataactgacatttaagtactaaggtcacaattaagtcagcatgccctttgtcacgaatggaatttagtgaagttttggaatgttagacaaaaacttagagaacaataacaatttatcaaaattggagagagataggtagtgaaattatatattaaatataagatattgtagaaccccaatgtgagacaactgacatattttgtaaatgataattcagtaattttacttatagtaagtgcccgggtcattttaaaataccaaatcatcacgtgattaataaaggaaaaaactttacaaggcatagtgacacctgcctattatcccagaacttggaagcttgatgcaggaagactctaagtttgagtggaaccagataaggataattagatactacccaaaaagtaaattagcaggatgaagttaaaaaataaagtatcaaacaaagcggtatgtacatataaacaaatatgtatttgtaacatattacttgaaggacatatagtatttttcttgataatagcttaggatgtggtaatgagactcatcaaattataccatgaataatttaaatttttatattatggacacatattatctttctttttaattacacattttgcaaattattattttgatcatgctctttaaccaccatattatcttataaagatatataattaaattttatttttaaatgattgtttttattaataacaatagcattttttacatcttgaattaaactcttcttccaggaacaataggtttaattaaaataattaaaactaattgtaaatctcatacaattcaaataggatgtgtgtaaacaatgttcataaatccccctagtaatatgcaaagcactttgcaaaggtataccctgaaacttaaaactgaattcttccattctgtgttgttcatattatcatctgcctccaaacagagcttatgtggactgtgtaaatcatagcaattatccctggttttaaagcagtcttcaacttctgctaagacttcctttgagtcacagaaaatttgaaagccatgtgttgacttccctctgtcccagtagaatccttgtgcttgggtagtttataataagagagtaatttgacttaaggttcagataactagggaatacaaatttgaggtttagaatttgaagaaaacaatcttactttggcatcctaacatggaaggttaaaaacacacggccggtcaaggtaccagccttgttgacttaagccctttataatatcactgatctattcaggagagtagagcctaaactcccaagaggcttcacattggatatgcttgaattggccattaatattctaccatattttgcagggcacgttgaaaccatagattgcagctcactcaagccaatataaataagcaaagaagtcctcaaattatacttttgattttctgttacattttctttagggagctgtctttgaggactactcaatatctatttggggcggcgggtgggggtgaggggaggggtgaatgtgctctatttctgtttcatccaagcattgagattaagaaactttcatttttgaggaaatgatttctcttataggggtttgaagtgaaaaataatgctgtgatgtgtttcatataaataaaacaccttgtctgtaaaattttaatcaagttgtacatatttgagtagtgctaactcttactcaatccttgtgcagtatgttggcagcaacagcaactgcatagggcctacatgcttactgtttaatatggtatcacctttaccaaaatccaagatggttagcaatttcaacgtattacaaaagaataaaaacgtctaatttatgcctctgtttatgcaagagactattgtaattattaattagttgttatggagtttattattatctcaagccagaaagttgacttcatatagcaataagaacattagcaaagaacacgattaactggtcaagaaggcaaaggttgttgttcaataatctcggcttcatggctcggcttacttgttgtttggctatatggcaaaattcagcactgtaactgtctgtttccttgtagaaagataacaatcataacacccagtgaaggtctgattatgccttaactctaaaaatagtgatgcatttggggctggggactgagtgtaggaaggagcataagaaaaattgtaagtcgaaatagagaaggctttgctttctgaacttaaatctgtctaagaaatcatgattttaaattgatgataatattagtttaaagaaaatataatttacttaattacccaacttcttgctcttcaccccccatagtctcccttgcactccatcttacattcatggctttttattctttaattattattgttaataaatcaaggtataaatgctacctgctgagtcccattgttgttcttgtatgtatttacaggtatagttgtaggtgtagatagagatagagatagagatagagagagagagagagagatacagatacagatacagatacagatacagatacagatacagatacagatacagatacagatacagatacagatattgacctgaccatttgaggttgaatagtcatttagggttctcatgtctatgcacaattaattctccttttcttggcagtgtttttttgtttttgttttgttgttttgttttgttttaggtattttctttatttacatttccaatgctatcccaaaagtcctaaaacttaaccaagtaaaaaattacagcaaagtaaagttctggtgccaattacatttgatttccactcctgtccttgacagttcctttagtatggaatgtttttctcttcaatatctacatgcatcatttctttcccattcttttttcttcaaataatgtttattgacagaattctttcttaccccctgcatttaacatttcttccacaagtacccttcctgtattctggtttatttttctaaaagcatttgatcttcttgacatattgaataccattttattaaggagcatctgtctcttaccaacaggaagtaagctttatgaaaggcatggctgaacacaatgaaatcatgctgcttcttagctaaagccttcacccctactttttatggtactggaaggtactcctactagagaaaagtaaacagcaatccagctacaagctgtgctctacactgtgtcttctagacacaatggcagtatgcaactgcaatgagcttgtacaggttcaagggcgacagagtcccagaactgaggaacactagacataaggttcccttcctaaccaagaagctatttctaacaacgttttgcaaggaaaaaatagttttctcaaatggattttcactgggtatataaaatatagttagattatatccaataacaagatccccaaaccatctgtattatggtttctagttctgtgttgttatggtatatgtgtgtgtgtgtgtgtgtgtgtgtgtgtgtgtgtgtgtgtgtctgtgcctgtacattgcatgcatgcacatctatgtgtactttatctttaatttagtttgctctttaacacacattcatttttttatactggaaactaaattcaaatatttttaataggttctcaattatagaacctatagaccttagttaatctaaaatcatggctttcacatccctatcaattttagatttgaaaaagcaatatagaatgtaaaaagtgtaagagtcattttttctcaccctagttctgggtgtccaaagtatgtgtctggtttacacatcagataggggcttatacataccatagatcagcccattgtgattggctttgtggggagcagtgtcaactctttgtctagaactcactaaataggctatgtaggctgagattataatctcatacaatcatgcctggctttttttttttttttaatgtgactttcggcattgatttcaggacctcatgattttgtagtaaaaacgtatccaatttagtcttacatcccctattttaaagactgaatttgtcctactaaaccctgttgttaagggcaggaatataggaggaagtgagtttgccaggctacgatcacacattaaaatttaatctgcaatacatgtcccacaaatcaactactgttctatcaaatgtgtaccagcctatcaggaattaaaatataggctactgaaatggagtgaagtagaaaatctcagatgccatgttcaaaagactgaaatgtacaaagagcaaactgtatgttttctttaatacaaaattaaaactatttgctgtaaagctatttaggagcacatgatgacaaatattgcttccttcattttgtggaatccctcaaacagctcagactattattaatatgtaccatctagctgctattcaacctctctctctctctctctctctctctctctctctctctctctctctctctctgtgtgtgtatgtgtgtgtgtgtgtgtgtgtgtgtgtgtgtgtgtttgagacactagctgatagctgcaataattatttaacagatcttagtatgtaaaatgtttagtgaataagggtccattgagagctttgaaggaagaatctcccttaattagcgaggccatgtgctttaattaggaagtagtaaatttgaagcaggaaaaaaaaaataattcaagacatcctacctgtcatgttttacatccctcatgaaatggaatgaactaatcttgtttttcataggagtcttctatataccacccccccaaaaaaaatctcaatcatgcctcaaagacaactttgaaaaccactcagtacagcagccattctgatgtgatttcaaagctgcagagatgcattatcatggaaacaagatcctggctgatttgaatttcatctgctcctgcagctcatcccctccttgtgaagtgataatatccctttatgatgacttctttttttccctcgctttactaaaatgcattgtcaggaataaaatatggtgattctagccagcattaacaaagattgatggaatcctggactaggaagttaagattctgtggtcctagatgataaaaactcttttatttcattagaaatttctcagttgttcagttcctgaaaattactaacaccaacatttatactgagaggaaaaaaaatcattttataaagccccagttgacaatcaacagtgttttaaaatgataataagatcattctaaactctgacaagacaacaaaaccattttatttgattaataaaattgtcttgtaaaaagtattcgcattgaaaatttcaattctatgcatatcattatatgttggtagacttccaagccagtgtttattctgttcaagtaaatgtcctaggttcctgagccatgatgttagaggattactgggtatggctaagttaagaaaacctgtatatctttctccatcctacatggattgggtacagagaagcttaaaataattacatctccatagatttattcaaagtccctgtgttgtgatttagttggtctatataaataaagtactcctattcaggcagttagtgtgtttctaggataagactgtagaatccaggtttcaactcttgatgtgcttaaatagtgtgttagcaaaagaagttctgggtgggacatagggaattctctcgcccttgcctcttctgttagaatgtaggtcttgatggtgttgggttgtggttgttaacacacagtattcagttccccaacagagtaaatacagaatcttaatcttggtttttttctttcttttctcttccttccttccttccttccttccttccttccttccttccctcctttctttctttctttctttctttctttctttctttctttctttcttcctttctttctttctttctccttttcgttttcttttttgtttattttttaagaaacatgttttaattactcttgaaattgcatggaacaaccttccataattcttctacctgaacttatcctacagtcagagaagtcagcaagcaaaatcattgaaaatgatggtaagattcaaatttagctaatctcataatatactattaatatttgtagtaatcaaaacattaagctactagattaaaagttgtcatacagattaatgggacaatatataaaacagaaataaatccacattggcttttgtcactgatattaatttagttgaagatatgattaaactctgtgaccaagtctggtttgcaattcccagtgtaaaccaggctgaattcaaactaacaatctactttcctcaacctccacagtgttgaaagaatagctgtgggtccccattcctccaaaaatgtacacttctttagtctactagttactggaaaatatttcaaatctatataataaaggacaaatagtttctaaaataaatgacaattaagataaggtatgtccacaggcaaaataaaattagattattttttattttacaacaaataaaaaattccaacacaaattggattgagaacttacatgggatgaaatcttaaaattactacatgaaaatatgcaaggaaagattattgactttgatcttttatttatgacccttaaaacgtagataacaaaggcaaaaaggaaaacttcaaacacccccccacacagagagagaaagagacagagagacagagagggacagagacagacggacagagggacagagaaacagagatagatagagagatagagactgagaaagacacaaagagagacagaaagagagagaaagggaaagagggaagagaactcttgtgtgtaacaaagaaaccaaccatgagagggaaagacatattcaaacgtgagaaaatatttgctaaccacattccttttttnnnnnnnnnnnnnnnnnnnnnnnnnnnnnnnnnnnnnnnnnnnnnnnnnnnnnnnnnnnnnnnnnnnnnnnnnnnnnnnnnnnnnnnnnnnnnnnnnnnnnnnnnnnnnnnnnnnnnnnnnnnnnnnnnnnnnnnnnnnnnnnnnnnnnnnnnnnnnnnnnnnnnnnnnnnnnnnnnnnnnnnnnnnnnnnnnnnnnnnnnnnnnnnnnnnnnnnnnnnnnnnnnnnnnnnnnnnnnnnnnnnnnnnnnnnnnnnnnnnnnnnnnnnnnnnnnnnnnnnnnnnnnnnnnnnnnnnnnnnnnnnnnnnnnnnnnnnnnnnnnnnnnnnnnnnnnnnnnnnnnnnnnnnnnnnnnnnnnnnnnnnnnnnnnnnnnnnnnnnnnnnnnnnnnnnnnnnnnnnnnnnnnnnnnnnnnnnnnnnnncacacacaaacacatatagacattcatacacacacacacacacacacacacacatacacacacacacacacacacacacacacacacacacacacacacactcacaccatgctccaaatcctgatgtaacaaagaccctggacagcaaaatgacctacccagtagtaacatggccatggagatctttcaagaagaccaaatccagaaaatgaaccattctccatctagaacatcctgccattgctcaaagccaggacaatcatgcagatgggcagcgcatttttggggcagagcttgtgaggagttccaggctgtggttgcatactaccctgcctgtccaattcagtaactaactgtatgcctcctagtctactgaatcctcctcatttccacacctattattgctatctcatgtctagttttacttttcttctctattttgttgcatcatgattcttaactctctacattgattaatcaaagtggcattgcaaactgcattgtgtcacacaatatattttacccaaatagctttacatgcaaatactaatagcaaagaatcattggtttggttcagagtctctggtttaggaagcactataaatactgaactatctgtgagacttgtcttgcataatcctgttgttggccagagtcgaggtgatcttgaagctgtgcagggagtcagaggcaggatttgagagagctacaggcttctctgcatacccctctgccttcagtgactgtagtaccactggcataccagtaagactatgatacttatcacctgaggtagcacctcagccttgtgttctcctctgctagcagagtaagtagctggggttgcagcagctgaggcttcatgctggctgaggctgtgaggactggtcctacacaggtatgtcattttactttgtctgctgtggccttgttcccataaggctcccaaactcatctccaccatgtgtggctctgctgtgtcaattatcctaccaatttcattagaccactttctaaaaccataagaccagcatttttttttgttgtactggagatgctatgggttctgcagactcagcaggctccacctcagtcactgtgtctacaattagaaccacctagcatctctcagacttctttgtgctgctcctagctcctgatgctaaacatattcttaataagaagataatatttaaataacttatataatataacatagcatttacagtggtcagcaaattatatgatttaaatatatttgcctttagcatttacttatggtatatgtgcagacgtgtgtgtatatgtgtatatatgtatgtgttgggggagttgtttacatttgtgtgtgcatatggaagtccagaagtgcatattcaatgttgtcttgggaactgcccattttgatttttgaagcaagatctctttcagggacttggatttcattaagtgatatagaatggttggctagtgagttctgggcctctgtctatctatagttccccagcatgtgacacattcaaatttttatgtgaatctaggggcttaaagtcacagaaaacactttaagtcacagatgggtctttctttcttggccttattatatatccatagtttgtttaaaaagcatacaaataaataacatacatattcaaatgttcaacttcactaattatcaaataattcatggactcggagatgactcagtagttataagcactgactgctcttccagtggtcctaagtttaattcccagcaaccagcaaccacatggtggctcacaactatctgtaatgggctctgatgccctcttctaatgtgcatgaagataaaatactcatatctatctatctatctatctatctatctatctatctatatgagtacatatgtatatacatatatatattcatataaataaaataaccttcaatttaaaaaaagaagattcaaagaaaatccacattttactattatcaaacacttgtcaacatgttgcttatcagtgacacatgggtggctttctgtagtgatataaaaaaagataatactatgctataaacacttatatttgatccaaatataaatcctacaactactccatgattcaacagtcccacttctgtgtacacatccaaaggaaagtaactcagtatttcgggcagttatgtgtactctgttgcagcccaaggttcacagaattcatagtagtcaatacgtggcatgaaccaataggacagcaatgacttctaaagagtgaagctttggcttctgtatactgaagggttgcatacaaagtgaggctagtcacacaaaaaaaggcaaatacttgaggatggcaactgtaggcattattttaaaagtccatcttcaagaagaatgctgatttctagggttggaaatgagaataatgagtggtagtccacggggatcaaatccagttataaagagtgaatttattctggagatctattgcataatgtgactgaaatttacaataatgaattctatctcaatttgtgaatagaaaaatccactctaacaactgatcttaaatattcctacatatgcacaggactgcaaatattttgtgagaaaatgctatattgtttgtgttagggcagtgaggagagagtaggtggatggatggggccctcatagaacctggagagatgggataggaggtctgtggaggggaaactgagaaggaggataacatttgaagtgtaaataaataaaataaccaaaaaaaaaaaaaaaaaaaaaaaaaggaacctacttctacagtttcctacatggaatgaaaacttgcagctatctaggacctacctgggtctctagcaccaaaatgagactgctgagatattcaggctatgaactgagcaactaccatatccttgacctttccaccaagatataaccccatttagaaatttctcataatatggagagatttctgaaatacaagttcaactatagttattaaggttatctcctgctggtatgggaggatcagcagagatgaaggacagctttaccatctgctcttggaagactttcaggaaattgctgagcagattttccacaggctaagtcatatgtatgtggttaaggttgtctgtaatgatattataaaggctctgctcactcacttctgtgacctaaaagtggctaatgccaggcataagaacatctaagccatttgtgttgcaccatgcttgaaagtctcacattatgatgtaagattcttctgtacatgttttcaggttctagtgttttcccttctcccttcaaaggttacccagtctcttagtttatgtataatactctctgaaattttcacaacaaaattctttaagtcagaaagggatttactgagaaaattacattacatttagacataagactaatctatggggttatattaatcaaatgttttttgcccagtacaaaaacagagaggaagtacagagaggaaaaaaatgaacatcacaagagatactacatatatgttcatttttatgaagagtttatcaagattatcaacaacatctatgatgcggagttctgaaatcagctaagaatgtcatatgtaaaaatttataggagaatcttgagattttgaagcaaagctttaccatcatctgaaaacaatgatactccttttgagagacagctctttgtcttggcagtaattgaacacttgataatggatcaccaagttaccatggtaaatgagcttcccatcctgggttgcatattatctgatccacacagacataaaggaggatgtgaatggcagcagcgcattgtcaaatggaaattgtataaacttggttgggccaaatcatgttacataaagaagttcctaaaacacctatggtttctgcctctgttgcactgtatctgtactaagcaggtacctgtagattcatggggtcattcttatcatcagtagtttgaggaagagaaaattaatgaatgttatgcagataccacacagaagtgaacagttctggtattacaacctctttctgtggcagaaagacttgaagagaaatctttagagatggcaaaactttgagcagcatacacaggagtacagtttgcttgacaagagagatggccatgtatgcaattagctactgattcaaggagtgtacttggttgtcaacttgacaataagtgcaattaactgaaacccaaacagctgggctcacccgtgatgaatttttcttctttggattatttgaggcagagccactcaccctaaatctgggtcatgtgaggacagaatagccactcaaaatctgggttacccgttctggtagcagcccacctgaaatgatgtgcaaaaaggatgtgtttgcttttactgcttgccctcactatcgcaggaaagtttgctagtgttagtacctacagttttgaaacttttaatgtggattagagactggcagttctctgggacttcatttgcaatccagcacaatattaggactactattgagacactgagtcttgtgtactaaacaactacccaactaccatgatatttccattaaaacacagtcattgttggattacagcctgtaagccaatctctttctgtctctgtctctctgtctctctgtctctctgtctctctgtctctctgtctctctctctctctctctctctctctctctctctctctctgtgtgtgtgtgtgtatgtgttctacatacattatactatcatttatatttctttagaagaccctaactaatgaagagagggaaatatacatagaatgaaaatatgaaccaatgtctagttagagtagaaatgttgaaagatctgtaactgaagcttgtgatagggatgagcacaagacaaataccagttaatattagctcagcattaatgaaaccacccatccatccttagcttgtaaacacagattagtcttgtgtctaaatgcttttcagagaacatttacttgttgtctaataatatcccctagtttggtattctcaaactctttttctctggggtgtattgtgatctgtatttcctacattcttctacaagtaagcttcataaactgtattctttatccatattctctgtttctatttgttcttttttgaaagattatataaaccagtttttttattttaaagctctcttgacttttctgttgttattcctaactaaccttgtgatatatttctcacattaattatatattcaaactcttttctaactgaaacttttactaataagaaagtgttagagtctagttctcttaaattcttacaggcagtttttccagttaccgaaaggacactacaatgtatgttcttcattgtcaagtataagttcatattattattactatttttataattttatttaagtattggtatcttcattattttccagtcctccttctgacttttatttccaccatctcctctcaaattcatgtcgtcttacaatttagttattattttaatatatatgatagtcctaaaaataaaatatctattaataaacataaaaagaggtaaaatatatttaaatgaatacaaaaattctatataaaaatttgaggaagcagctagaagatgcaaacatcacacagactcatgaactggtagaagtactcatgtctcttccaacaaaacaatttatagattaaattcaatccttatcaaaagctctctggtattctttaaagaaaaaaaaaaactaaattcatatggacccacaaaaaaaaaaagcaacaaaccaagaaaactatatcagtatttaacaaaaggtgtactgctgagggattatctttcaacaatttaaacctagccatgtgaacaaacccagcatggttctgatgcagaactgaacaggtaaaccattggaacaaaatagaaaccataaatataattccacctaaccacaaccatctgaagtttcacaaagactccaaaaatatactctagacaaaagacatttccaagaaataatgctgagaaatatgtgactgtatacttgttaattcacttgggttaaagattttgggtataaggagaagaaaggtggagaaagaattttgatgtcaatattactataggtaattactaaaggtaagatgactcattagaattaatttggctactctgctttggacagccagtaaagaggcttctccctggggatggctacttcttctccagaccctttagtcctttatccagggttgagatcctatgaaactcccccccccccccattaaacttaccatatccactgacattgccattgactgtttcacagtacagttctggtattctggctcatgaattatttccactctcttccagatgttccttgaagtacgaatgcaatcattgtaatgtagatgtatctgttaggactgagttcccatgatttattgctcttcgcattgcatcagttgtatttctccgtgatggtctatatttgtggggggccttgataagagtatgagagagcatacaatgagcaaccaaaacaactgaagcttactggggtaagttggacaggagataagtaacatcaggctccttgagagtctggcatcacttcagttagtctgctatagcacatatgcatacatagtcacatgcacactgtcatagggtggatgatttcaacagactcttgcaaatttcagtctgagatctggtgagttctaaatgaagatggatgtccaggatctggtaggtcttcttgtgaagttgcagacagctcagttttccttgattctgaaatggcaggcaggaaagagtaaatcagtcttatcatctcccttctaacctgaatcctgatctcaaaaggatgacactgtcttcatggtttaactatctcaaagtggctctccttcaacataacagtgttagtatttgattagaaacatacatttattgagggacaccaataacaaatatataacactgacaagacaaataccattcttcttatacatgtctgaatcatacctttaaaatgtatataagcacagacactattgcacatgccagcaagattttgctgaaaggaccatgatatagctgtctcttgtgagggtatgccagtgcctggcaaatacagaagtggatgctcacagtcagctattggatggagcacagggcttccaatggaggagctagagaaagtacccaaggagctaaagggttctgcaaccctataggtggaacaacaatatgaattaaccagtacccccagagcttgtgtctctagcagcatatgtagcagaagatggcctagttggccatcattgggaagagaggccccatttgtcttgcaaactttatatgcccagtacaggggaacaccagggccaagagtgggagtgggtggttaggggagcaggtgggggggagggtatgggggactttcaggatagcatttgaaatgtaaataaagaaaatatttaataaaaaattggaaaaaagatgtatataaaatactgggcatagtggtgtgtgcctttaatctcagcactagagaggcagaggcaggagattctctgtgagtagcatgctagtcttgtatacatagagttcctgaacagttaggattacaaaaagagaccttaactcacaaccaaaccaaatcaaacaaaaacagaaaaccaccactaccacctcaacaacaaacaaaacaaacaaataagccaacaagcaaacaaaagaacaaaacaagataaaaatccaaccaagtcaaatactggtgtagtagttcaggtctgcaatattagcatttgggctaagataggagaaatgacatgaagctgaggctaccgtgagttctggagtgttaaaacaatttctttggaagacagcaatccattacttcatgactgtaaccacagagaaatgacatcctttctatgaagtcaaataacctcctcttccaattaatcatctcatcccattaatggcttccaagcgaagctttcaagcagcaggagctgcagatgtgaatgctttcattttatttcaactgaaacgaatccctcgcatcacttcagagctcactggtgaaaatgtaattatgctcttttgcccatgaatagcacctatacatcacagtagtatacatcactgagattttattttatgaattaaccatgaggcttatctttcatgattgagatactacttggaaaaaaagtgaaaaaaatagtgatatactgttctaagatatctatcgattgaaacaaaattgtccctcatttagctataaaaaaaaaaattctgaccaatttccagttaactgaaagatgaagatatagtgctttcttgtcgccacatgccacaccttctgaggtttgattcccagatttatgaaaccatttttttctattgaccttttaatcattctatttttcagctgccaactttttcatgagcatatatttcttaaataactgagaagcaaagaacaagtccactaattttgaaatattttcagaagatagtgatgattaattaagaggaatcctaccagtatgcttttgattttgtcattctttgatctcctccatacttttgggaagtcaccatgattcattgtcatttctgattgtttgaagttgatttcctaaaaatgacataaagatgactatgtttgaaaatgtcaattggaggttatctttataattggagaacaatggaaagagcctggttttattattcagatacataatcttttataaaattaggagataggacagctttgcatttaattagaagattagatagaaaaggatttataataagaggaaccagtagggagaagaaataaattcttgtgatatttggtgtagtagagtaactatggctgacagaagttgatgtcataattcactgaagtgtggaacatgtagaatgttctctgcacaggcacatgatgtatgtctgagatgacggctgtgacagttaccctgatcttagtattgtacactgaaaatacatcttcaggtgccacactgatattgctgatatatagagttgctatttatcaattaaaatatatataaaggaaaacattagaagaaaagggagtccttgagcttgggacccaaacagaaaaatcaaagataaggataagtagatctgaatgtttaagagcaggactgaaagcaaggttgggcattcagaagaaaaaaaaacctgctttccaggagatgttagaccctttaaaaatgggttgaattaagattggttgttctattataattaaaggaagtcaagtacaatcattttcactaagaaaattttatctctttcatagtgtaaatgtaatggcacagtcttcactattttaggaacatattttaatagccagggtagccatgatcctctaccactgacaccaataattgtgttttaaaaggtacaaatgaatctcaaatgaggatatataaataaaatgtctcattccaaatgttactttataattctttctgtggtgtgtggagaacagtatggcctcatggtattgcagagataaccacagttcactcgctgcaattattgtccccagtccaggagtatcctcagaagtattttcaccacaccaaggaaactgacttctaatctggacaaatggaattagattgttcgtgttctgtctctttggagcactgcaaccctgctatgaaagcaggtaactataactgcaagatctatcaggcacaaaagtttacttgaaaaaaaatcctagagttatgatagtaacttttcgcacttgagcccactttgattttagttgactttcaccattttctggttcagagagattggcctttatcctttttcccttagaacactagaattaaaaatatttatggtttgaagtaatgcattcacttctatggcaaaatgctgccaatgggtgtttttctcctctatttcagaagatgattacatgttcacaatttacaaggtattgtacacatttcagtggggaattgtaagcctttatcttttgacagcaagaaggaattgctgcccttttttaaatagcctccctattttgtccaaataaatgattcatgctggagacttcatgatgtcttttgttggtttctgtgaatttcaacacaagcagtcaaaagggaaagaagtaatgcatttctgaaattttcagcaaattataggttttatatggaaagaaagatgcattcaaatatctctcgttctggtctcgtcttccttctatgctttattaatgcaaagcctgaatcaaggaaaggaaaataaatgatagggtaggaaatggatattttcccttatttatttatttatttatttatttatttatttatttatttatttattttctgcagtgcatgctccaggtccagataattccttctttatacttacagcagcaacaaaaacagtaaggaatgtctggctatacttaaccacgattctcagaaaactctttgtttaataacatcacatttttgtgagtgtaatctatttctgacatttcttaaaagtataaagtttaaataatgatcaaagacgctttggagagccttctgtgtataattaaagaagtgcttgttgctttgagactataaatacttgaaaaaaatttgtgattgacatccaaatcttatcactttgtctaagggccctacaattgttaatgcttgaacaagtctaaagcagactaaatcccagagttaagggggaggtaggcacattgtcccacccttagatgtggagtgatagataactagctgttggaaagacaagggtcggttttctctgaaagcatagcacctgacagtagataaggctcccttggaaaaccacacatccatgaatactatgaacagcacaaggaatctttaaaggctcttaaaacataaacagagatcagtagataggaagtggagagtcttggaagagtttgaattaatggaaaatttcaaaatatgacttacaaaattctcaaagaattggtttttaaaatgtcaaaagtcatgtgatcaccttcaaactcttcttaacttgaagaagtaaaattcaaactttaaattctaggaatttctgaagcactgaaaaaatgaaaagccatgaaatttttattataataaatgatccaaaaacatacacagaataatattccactatgtcttagaatgcaagggaattggtaaggcttgtaaagccaaaaggaaagagaattgactgttaggagcaatcaaaataaaatgttagtaagatgtgctggaatcttctatggtcatgataatgctaacaaaggggccatctgcagaaagagttcagtacagtggtttgtttcttccagttattggtagcaagattccaatgtgaaatgcagagtcaggtccttgctttcctgtatgcacactctagttcctgaaactgtatccttgcgaagatctccttgtgttctactgtaaaattcagtctccatcaggcaatcatagatccctccttaattcttccagatctgtcacagagctacccctttggataaaaagtctagtgggtttgactaagtcttagaaagatgtgatattgaagcatttgtaaagtgggatgctgataatttcaggaatctgtgatttcttagacagagaacttaactgcctttctttatgtgctgactttaatacctcttccaccataggaccaatgccataagctctgctcttggcaaccattcaatgtcctttcatctcatggcaaacatctatgcctccctgccctgcttagaggcacaaatgtgaaacaagtgcatgtatgtgtttgtgtatgtgtgtgtgtgtgtgtgtgtgtgtgtgtgtgtgtgtgtttgtcctgcaggaagtattgaaaattgcttcattgatattcactccaaatatgaaacatatggcaggagatttttctaattgaacattgttctttaacatcaatcaaactaatatgaaaatatttatagtgtagaggtgatgcatgatgatattatataaatatatgtatttatcatgttatccagaaagaatttgcttgtaggattattccttttcattctcataaagataattcctccattaaaatttaattttcttcactttttgaggatattattgcagttatttggatgctgtttgaactcttgaaagattttacagttttaaaatttgatataaactatatgatttaaaaatatgttattattggtttaacaaaatgttctttaaagtgatccatcgtgatgtaattcacttgtattccctgtacccctgtactgttctatggtattttccctacttgttactacagattgtactcagaaacattcttttcaaggtcaccgagggaagtcacacaggaagacttctctagggcaagtggttagcattgcaaaaaataagattatagagaagagagtgaaatcggcaatgttttttatgtaattctaaaattttggaacagaagtgagattatttgttagtctgaatcacatttaaatcattgccttcctacatactttcaattttatttaaagcttaagatagtgacaaggtgtcacatatacacgaatgatcaattgtcttagtaacttttattgaagttttcaactttccccattaaaaattccaaagataataaatcatgttccctcccacacttttctctttttagtgttaatattctcttccacggctcaaattttatatcattttattgatacaacaactccttactcataattgtattgtagtaatgatcttagtcctctaagttttttacccaattttggcagtgttcagtaattttagagtaactgacctacaaagctttgaaggtcaacctgacaaactacatatggtgaaacatcagcaaagattatacatagtgcagaatgtgtatgcttataagcagtgaaaatgataaggttacaaaacaaattgttccattggacatgaagtatctctatcaatctcttcccatccccgtttcaagaagcgcctctgaaggaggaggaaggaatgcatgagctggcccatggggtagaaagctacagaatgctgacttgtgggcagagcactacagcttcacaagcttacagcagctgcagttacttgtgcacgatctccacaagccagtcaaaagtccagcacgaactgcatgtagaatggtccctaaggtcccacctgtgactgagatgttggcagttcacatcttctgagggaaacaacaccgatttccttttatagatatggcctctggtaggttatacttatacctatgagaatgggtctatacccataaacatgtgacaacacaataggcctcaagtggttattaataacaatgaaaaaagaaaacatgaagttgagagggaggcaggttagggaaactttctgaagtaagagcaaataagtaatgcataaatatgatcaaaatgtatttcataaatgcataaaagtagaaacaaatatattattttaagagtagatatcattaactttatttgtataactaataatttcaaattcatttatactaatgaaacatgttttgttttttgttttgttttgttttgttttgttttgttttatttttgtttttggttttggttttggtttttgttttttagtttttgattttttgagacaggcttttttctgtatagcgctggctgtcctggaacccactttgtagaccaggttggcctcgaactcagaaatccacctggctatgtctcccaagtgttgggattaaaggtttgtgccaccacgcctgactgaaacatagctttaacttgcgttcccccaaggcttccaattgtattggggttactgaaattctcgacaattcaggctgttgtcaggatagttaagatgtgctttatatacatgtataaaatataaatacacacattcgtatgtataagaatcagggttaaatttttcttttatgacattatcaaataaaaaataataaatgtttattgaaggaatgtgttcttaagtagacaattctaatcaatcattaaaattcaaccagttgtttgaaatgtgagcagatgaaacgagaatgtctttgcatgctaatgtacttcttttgcacattctatgagctatttgttttcttggaagtatatgggatcagaagtcatatataatgtctttcaatgtgtgtaaaatgagtaatagatctggcacaagatgagctatgtattgggatatatgtggtccagaggaaaggttcactaattgggaagatagacacctgagtgttcattcctgtatcttggggatgggaaaagtagagtaatcctggctgctggcacccaagttctgcctcccaaggacctttacatagaatgttatgactttcttcccaatgagctatttgtcttcttttgaattaatccaagaaacaccaagatgaaagcatcaacacgttgtatgtatgactcttgaattaatactgtggttgcttctaaaatgtggacagctttatttatttatttgttgttgttgttacatcttcagtcttcaaattatatttagtcaccctgaaatgtattcactttgtttttttggattattattattattattattattattattattattattattgttattattgttattattttacttacattccagtcattatccccctaatcttccccaaagttccttatcccattcatccatccacctggcctagaaaagggtgttccttcccctgcccaacaggcctcccctttccctgaagcctcaagtgcctccaggaataaatgtatctgctcccactgaggcctgaccaggtagatctcatctatatttgttctaggggcctctgacccacctggttggtatactcctggttggtacctcagtctgtggaagctccctgtggtctgagttagttgagactgctggtcttcctatgggctcatcctcccattcagcttcttcaatctttccgttaattcaaccatcatgatgcccggcaccagtccaatgatgaggtgtcggtatttgcttctgtctcagtcagctgctggtagggtcactcagaggacagccatgataggctcccacctgtaagcacatcatagcatcagtaatagtttcaagccttggattctccccaacacaacatcatcagaaatcaattccaagttggaccagtcactgaaccacctttcattcagtatcttctccgttttttgttgttgttgttgattttgttgttgttgttcctgaaagtcttctagacagaaacagttctgggtcaggtattttgactgtggattaggaatatggtccttctgcttgagtcactgtctatctactggaggtggactcttcaagttccagctctccactgttgggcattttggctaaggtcatcctcattgagtccttagactctctcaccttccatatctctggtactttccagagggtccaaacactttccaacctgccagtgttgcttatctccattcattctcttggcttctgggcttatttctcactttccactccaatatctgatcctgttcctcttttacactcccacacaggtccctccctcactctgcctcccttaattatttccatcccctcttgtaagtggaattgaagcatccacacttggcccttttttattgttacacttcttatggtctctgtgttgtaactattctgtactttttgaataatatccactaatcagtgactacataccatgcatgtctgttggtgacctagttacctcactaagtgtgatattttctagttccatctatttgcctgcaaaactcatgatgtactatattttaatagccattatgtaaattaaccacactttctgtatccattctttgattgaggaacatctgttttttttttttttccagcttcttgttattacaaataaggaccatgtgaacatagtgggccatgtgtctttgtggtatcattggacttctttttggtatatgcccaagagtggtatagctgggtctttaggtagaaccattttcaactttctgaggagcctacatattgatttccagagtagttgaccagtttgcaacctcactatccatggaggagtgattgttcctctttctccacatccgcaccagcatgtgttgtgacttgacttttttttttatcttagacattgtgattggagtaagatggaatctcagggtccttttgatttgcatttctctgataactaaggacattgaatatttctttaagagcttcttgaccattcaaggttcttctgttttgaattccccttttagctctgtaccctatttttaattgggttacttggatttttggaggttaacttcttgcgtcctttatatgttttggatgtaagccctatgtcaaatgtagggttactggagatttttttccaatctgtagattaatgacttgtcctattgacatgactttccccttacagaagctttttagtttcatgaaatgtcatttatcatttgtttatcttagagtcagagccattggagttctgttcaggagattttcctctttgccagtgttcaaggctctttcccattttctgttctattaaattcaatgcatttagttttatgttgaggtccttgatctacttggacttgagctttgtgcagtgtgataaacatggatctattttcattcttttgcatactgactgccagttagacccatacaatttattaaagatgttttcttttttcccccaatgtatgtttttggcttttttttcaaagatctattgtccataagtgtataggtttacttctgaatatttgattccatttcattgattgacctgtctttttctgtatcgatatcatgcaggctttatcactattattttgtagtatagcttaatgccagagatggtgattcccccagaagtttttttttattgttgggaattgttttggctaacctgggcattttgtttttccagatgaatttgagaatttctctttccatgtctttgaagaattttgttagaattttgatgggaaatgcattgaatctatagattgctttaggtaaaatggccatttttcactatgttaatcctactaatccatgagcatgggtgatcttttcatgttctaatgtctccttagatttctttttcagagatttgaagttattgtcatatagatctttcacttgcttagaattgcaccaagatattttatactatttatgactattgtgagtggtattgtttccataatttctttttcagcctatttataatttgtgtaaagaaagactactgattttttgagttaattttatatcctgccacctagctgaagttgattttcagctgcagtacttctttggtggaatgttgagaggtgctaatgtctactatcatatcatctgaaaatagtgatattttgagttcttcctttccaatatggatcctgttggtccctgtttggtgtctagttgctctatctagaactttgagtaatatgttgagtagatttggagagagtggttaaccttgtcttgtcctggattttagtgggatcacttctagtttccctccatttaatttgatgttggctgctggctttctatataatcatttattgcatttaggtatgtagcatgaattcctgctctgtctaagacttcaaacatgcaggggttttgtattttgccaaaaagatttttcaccatgtaatgatatgataatgtggcatttttccttgaatttgttcatacaatgcacaattttgatggatttttgtatattgaacatccctgaatccctgggatgaggcttacttgatcatggtgaatgatggttttgatgtgttcttggatttgctttgtgagaaatatattgagtatctttgcagatagtcaatagcgagattgttctgaagaccttgtctttctttgttgggtctttgtgtggttttggtatcagcccaactgtagctttatagaatagaatagggagtgttccttctgttttagttcatggaatagtttaaggaatattggtattaggtcttctttgaaggtctgatagaattctgcactaaaaaccatctggtccttggctgtttttgttaggaaattttggatgactttttctatttccttagaggttatgagaatggttagatagtttacctgatcttgatttaacttcagtatgtagtatttgtctataaaatcatccatttcatttatattttccagttttttagagtatagactttgaagtagtttctgattgatttttttaaaaatttcctcagtttctgttgttatgtttccctttcctttctgagtttgttaatttgatattttctctatgccaatagttagtttggctaaaggttcatctattgtgttgattgtctcaaagaaccagctcttgttttgttcattctttgtatagttcttttttaatctaactggttgatttcattcctgagtttgactatttcctctttggtgtgttttcctcattctgttctagacttttcaggtgtgctattaagttgctagtataggatccctctactttctttatgaagatacccattgctattaattttcctcttagcactgctttcattgtttcccatatggttgggtatcatgcatcttcattttcattgaactctataaagtccttgatttctttctttatttcttccctgaccaagttaacattgagtagggagttgtttagtttccatgcatatgtggtatttctattgtatttgttgttattgaagtctagccatggttatctaatagaatgcatgggattatttcaatcttcttgtatctgttgaggcttggtttatattcaattatatggtcaattttggataagtttccatgaggtgctgagaaaaaaagtacattttcctgttttggagtgaaatattctgcacatatctgttaaattcatttggttcataacttctgttagttttactatggctccattgagtttctgtttcaatgacctgcccaatggtgagagtggacagttgaagtctcctaatattattggttgaggtccaatgtatgttttgagctttagtaaagtttcttttacaaatgtgggtgctctttcacttagggcatagaattgaaacttgcatgctcagaattgagacttcttcttggtagatttttcctttggtgaatataaaagacagctcttttctgtaggaaaattgatataaaaatatggcaatgaatgagaaagaaagttattgacagtctgttttctctagtctttttcttggcttgaaaattgaatttcagtaacttcatagttttacaaactagaaactttcatattaaaatatatacatgttatattttatatatatatatataatattttatattaatatatatatataacatgtatgtgtgtatatcttaataaggaggaaggaaaacatctcacacatatttgcaaatgtctcattaaaaatgtcattttaatactgtctctatcttcacatgttctaaaaagtattgatattcttaagtcataatattcaggcaacatcataaaatttattaagcatcatcgtgtcagagatgggtttgtaacttgggtacaaaagtcttcaaaatacctgttctttccagggaaacatttcatgatacctttgtgaaagagtatgttagcatctgtagatagaacagggttatatgtcaggaccaatgattctagcattcattcttgctttctttctcaatattttgaataaacggcagtataaatttatgtggttaagagtacagtcctttcattaaaattatcagagcaaataatttagatagtatactaaatagcaaagaatccattgaaatggatatgtgagaatataatgcttttttgtttatataattcatctagctttgtggattatggtgccactgaatatctctgttaaacatgagaccatgagacacagtaattttatcatcttcttccatcattttgttgttgttctctccttctcctcctcctcctcctcctcctcctcctcctcctcctcctcctcctcctcctcctccacctcctcctcctcatcatcatcatccttttcataaataaatctaggtacagaagctcaggtcaaatcgtattttataataacttcaatgtatccatttttagcatctagctctttaaaatagtctttcatttgagattgagtactctggatggtaatggccatatgtcttggaaaaaggctgaacaattcagcacctggtgctatgttattcttagtttaatatcattattagtgaaagtaaaagatccttaagattctatttcaagttttccagtttttttttttttcatttgccctcttgggacaaagatatattgatgaactatgacatatacccataaaagagcattgccaaaaagccctagaacaaattaatttatataagattctttatctcttaagtaatcatttctagtatatattgttgagtgattgaaaataataaaagtattcccaatgtgctaataatatatgcaaatatatttttgactggtccttttcaagcatcatatatatgcttatgtacttataaatagtggtatatggatatccaacattgtgtgatatgataattacaatatgtatttgaaaataaatatataaaatatcctatatcttgggtatctaaatatggaatatattttgcttttttatttttacctataataattatttacattttgtggttaaatatacacatagcctcatggtgaacttaaatttacaagttaatgaatttacagctaggtagagagacatgtatttgtaattccagcattcagcagatggaatgattgtggaatgagggttagcctttggtacatactggaaaaatatgctggttacattacatattagggatatagtaactataaagttttctacataaaaacaaaacaaaacaaaagaaatcatttgaaacaaaataaatacatattataccctacaacttaatgtatgtacctgaagaaatattagccagggtttgaaatataagacctttccaaaaatgtctattaagtaacacaagacaagggtataacatttgtcctggatgtcatgagcaaactttaattaagtcactaacttaatcaatcttcccaaaaaacatataagtagttgcaagtggccacaattaattcttctctgttgttctcttgaattagtagatgtggttatttctatatgttcaccacattattttacaaagaaatctgaactatagttttagggtttttaacttttattgcaaatgttaatgtaacattaaaattcagcactatgttcccaggagcaggaaaatgcaaagggcatggttttcctaatgtgattaatttgttattgtgtcttaggcttctcattaggacacacatttaagtttctaacctataaattaaaaaaaaaaaaactaagcttggaaattctttcatgttttttctcaaaggactgaaaactcaggagtttattttttttctattttataaatcaatgtgtcgttttctttcttaaatctacaaacaggttatattctattactattcagagatcaccttggtcttttggcatatgtttgtgtatgccgtgttgcatgtgtaggaggcaaaggacaatctagggtggctgtaatcaacatctaccttttctcattattgtttccccccatctgtgctacatatgccaagcaatctggtccctgagctccttgggttctcttatctctgtattcccatctcatggctagagtactggatggcaggtgtatagtactggcctggactttatgtggtttatgtggatttgaaattaagtcttcacactccgttggcatgcacttaatgtctaaactgtaacttcaaacttgtgtgcatggaagtgcacataaatacctgccctgattctttttcaagtaatgtctgcataaatgtattcagtgttattctgaacgatacaccaaattacaaattagtccagaagaaaaataaatcaagaagaatctcactatagtgttgttaagataattaaatactaacttgtatttcctatgcataaaaaggggagaatagtaatgagacaaggtagatgctgcttaagaaaactcttgattgtcctttgtctcctacatatacaacatagcatatacaaacatatgccaaaagaccaaggtgatctctgagtagtaatggaatatacctgtttgtagatttatttatcagactttcacaaactatttatataaaatattttctatcattatcaatatattttatttattagatgttgtctttatttacattttaaatgttatcccctttcctagttttctctccaaaaatcccccataccctttcccctccctctgctccccaacccacacatttccaattcctggccctggcattcccctaaactggggtctagaatcttctcaagaccaagggcttcttctcccacaaatggtcaactaggacatcctctgctacatatgcaactagagacatgagctctgggggtattggttagttcatattgttgtttctcctataggaatgcagacccttcagctccttgggtactttctctagctccttcttcaggtaccctgtgttccatccaacagatgactatgaacgtccacttctgtatttgccaggcactcgcatagtctcacaggatacagctatatcagggtcctgtcagcaaaatattattggtatatgcaatactgtctgggtttggtgattgtatatgggatggatccccgggtggggcagtctctggatggtccttccttcagtctcagctttgaactttgtctgtgttactccttccatgggtattttgttcccccttctaagaaggaatgaaatatccacactttgatcttccttcttgagtttcatgtgttttgcaaattatatttgggtattctaagtttctgggctaatatccacttatccttcttcatccgggactccgcagaacttaggaaattagtctgcacaggtgagagtctgcaccacagaagctgacagcttctgagacctgccaaagcaacacagcttctgagaaaggtcctgttttgggccttcttcttcttcggccaggaggaggtccaaacacaagatatctgcacacctaccctgtaagagagcttgccagcagagagtgctctgagcactaaaactcagaggagagaatctgtctcccaggtctgctgacagatggtaacagaatcaccagaagaacaatctctaaacaatgtcaactataactactaactccagagattaccagatggcgaaaggtaaacataggaatcttactaacaggaaccaagaccactcaccatcatcagaacacagcactcccacttcgcccagtccagggcatcctaacacacctgaaaaggtagacctggatttaaaagcatttctcatgatgatggtagaggacataaagaaggaatttaataactcacttaaagaaatacaggagaacactgctaaagagttacaagtccttaaagaaaaacaggaaaacacaaccaaacaggtagaagtccttatagaaaaacaggaaaaaacatacaaacaggtgatggaaatgaacaaaaccatactagacctaaaaagggaagtagacacaataaacaaaactcaaagtgaggcaacactggagatagcaaccctaggaaagaaatctggaaccatagatttgagcatcagcaacagaatacaagagatggaagagagaatctcaggtgcagaagattccatagaatctgtgctggttctttgagaaaatcaacaagatagacaaacaattagccagactcactagagggcacagggaaagcattctaattaacaaaatcagaaatgaaaagggaggcataacaacagatcccgaagaaatccaaaacaccatcagatccttctacaaaaggctatactcaacaaaactggagaacctggatgaaatggagaagtttctagacagataccaggtaccaaagttgaatcaagatcaggttaatggtctaaacagtccgatatcccccaatgaaatagaagcagtcattaatagtctcccaaccaaaaaaagcccaggaccagatgggtttagtgcagagttctatcagaccttcaaagaagatctaatcccagttcttcacaaactattccacaaaatggaaacagaaggtactctacccaactcattctatgaagccacaattactctgatacctaaaccacaaaaagaacccacaaagatagagaacttcagaccaatatcccttatgaatattgatgcaaaaatcctcaataaagttcttggtaaccgaatccaagaacacatcaaaacaatcatccatcctgaccaagtaggtttcatcccagggatgcagggatggttcaatatatggaaatccatcaacataatccagtatataaacaaactcaaagacaaaaaccacatgatcatcttgttagatgccaagaaagcatttgacaaaatccaacacccattcatgataaaagtcttggaaagatcaggaattcaaggcccatacctaaacatgataaaagcaatctacagcaaaccagtagccagcatcaaattaaatggtgagaagcttaaagcaatcccactaaaatcagggactagacaaggcttttcactctctccctacctattcaacattgtacttgaagtcctagccagagcaattcgacaactaaaggagatcaaggggatacaaattggaaaggaagaagtcaaatcactttttgcagatgatatgatagtatatataagtgaccctaaaaattccaccagagaactcctaagcctgataaacagcttcagtgaagtagctggatataaaattaactcaaacaagtcaatggcctttctctacacaaaggacaaacaggctgagaaagaaattagggaaacaacacccttctcaatagccacaaataatataaaatacctaggcgtgactctaactaaggaagtgaaagatctctatgacaagaacttcaagtctctgaagaaagaaattaaagaagatctaagaagatggaaagatctcccatgctcatggatcggcagggtcaatatagtaaaaatggctatcttgccaaaagcattctacagattcaatgcaatccccatcaaaattccaactcaattattcaacgaaatagaaagggcaatcagcagattcatctggaataacaaaaaacctaggatagcaaaaactcttctcaagggtaaaagaacctctggtggaatcaccatgcccaaactaaagatgtactacagagcaattgtgataaaaactgcatggtactggtatagtgacagacaagctgaccaatggaacagaattgaagacccagagatgaacccacacacctatggtcacttgatctttgacaagggagctaaaaccatccagtggaaaaaagacagcattttcaacaaatggtgctggcacaactggctgttatcatgtagaagatttcaaattgatccagtagtatctccttgtactaaggtcaaatctaagtggattaaggatctccacataaaaccagagacactgaaacttatagaggagaaagtagggaaaagcctcgaagatatgggtacaggggaaaaattccggaatagaacagcaatggcttgtgctgtaagatcgagaatcgataaatgggacctcataaaattgcaaagcttctgcaaggcaaaagacaccgtaaataagacaaaaaaaaaaaaaaaaaaaaaacacacaccaacagattgggaaaggatctttacctatcccaaatcggaaaggggactaatatccaataaatataaagaactcaagaaggtggacttcagaaaatcaaataaccccattaaaaaatggggctcagaactgaacaaagatttctcacccgaggaataccgaatggcagagaagcacctgaaaaatgttcaacatctttaatcatcagggaaatgcaaatcaaaacaaccctgagattccacctcacaccagtcagaatggctaagatgaaaaattcaggtgacagcagatggtcgcgaggatgtggagaaagaggaacactcctccattgttggtgggattgcaagcttgtacaaccactctggaaatcagtctggtggttcctcagaaaattggacatagtactaccggaagatccagcaataccacttctgggcatatatccagaagatgcccaaaccgataagaaggacacatgctccactatgttcatagcagccttatttataatagccagaagctggaaagaacccagatgcccctcaacagaggaatggatacaaaaaatgtggtgcatttacacaatggagtactactcagccattaaaaagaatgaatttatgaaattcctaggcaaatggatggacctggagggcatcatcctgagtgaggtaacccaatcacaaaggaactctcacaatatgcactcactgataagtggatattagcccagaaacttaggatacccaagatataagatataatttgctaaaaacatttaactcaagagaatgaagaccaaagtgtggacactttgtcccttcttagaataggaaacaagacacccatggaagaagttacagagacaaaatttggaagtgtgatgaaaggatggaccatctactgattgccatatccagggatccatcccgtgatcagcttccaaacgctgacaccattgcatacactagcaagattttattgaaaggacccagatatagctgtctgttgtgagactatgccaggccctagcaaacacagaagtggatgctcacagtcagctattgaatggaccacagggcccccaatggaggaactagagaaagcacccaaggaactaaagggaactgcaaccctataggtggagcaacaatatgaactaagcagtaccccggagctcttgtctctagctgcatatgtatctaaagatggcctagtcggccatcactgcaaagagaggcccattggacttgcaaactttatatgccctagtacaggggaatgccagggccaaaaagggggagtgggtggataggggagttggggggggggtatggggacttttggtatagcattggaaatgtaaatgagctaaatacctaataaaaatggaaaaaaaaaagaaaatagaaaggtaggaagcttaggggaaatgagagatggagaaagagagaaagtctgattgaggaaggaagagaaaaataattttgcagtttccttcttcttagatgtgaaaatacaatcacttagtttttaaatatcatgtgtgtgtgtgtgtaatcactagtggttcattctttttattaagctgatagcaattaggaaacaaatatttaacatatttgaataagtggaatatgtcaataaacaagaataattgggaaccttatgtactgtttattaatgtagtaattgctgctcaaattagactcctccacattgaagaaacattcattctaagtcataatgatgaagggaggacttgcttataccttgcctgattgttaaatagtaactcaccctaaatcacgtgatttgtttcttaattagttaaattctatgattttctaagcctcttcccaagaagcaaagattgtaaagctcacaatattcaatgaaagacttagattcttttccttcttctactcgcttttttcttctctatttacctgaatgttacatcttcttaccaaagttattttcttagattatcttatttctgtatgagtattttcttttattaattttatgtactatatttgaaaagaaagaagaagatgacagaaaagtaatagatgaaaatattttatcatttaatttcttacaagaattctagatcataaaatatttgaacacaacaattctggacatatactacttcattatttattattcattttgctttgctttatgactaacattaaactgggtatgagtctttctaacttgatcagtgccttgaacccattcacccttttctctgagaaattgcaatgtgatcagacatattttaaaatgtctttagtcactgtcaacatccttgattctcatttcttgagttgtgaaaacacaaatgtcaccaagcattgacaattacataattatagttattgataaaccatgaattggactcttctttttctgatttttatactttaaaaatcaatccatactttaaccagatgggtctgtaagattattgaatcttagtgttgataacactaacacaagaaatgactagaatatgttgttcccaatctcttactattttaaaatgaagtgggtttttttttgtttgttttttgttttttgtttttttttgttttgttttgttttgttttttggttataggttacttagtttgatttgatttgatgagacagagtttctctgtgtatcccttactcttttagaactcactctgtagaccagactggcctcaaactcagaaatctacctatgtaccaccactgacaagcttaaaataaaggttttaaaaatccttccttagagattcaagggtatgtcccaaagatgataagctcaatgcctactactttttatagaaatcctatcagtggaaacaccaatagacttatacagagacagagctcaacctaggagagatctacagtaaacatgcagaatagtaagtagcattgcaggagtccttgaaggcattaactgcatgaaccaattgaaggaaattgtcattaaaagagagcagcatccagaagtccaactacagaaaagttcagagttagaagacatgaacagcaccatatttaggattctataggataaaaactacagtatcagtgttcacatatattaatttataacctccctgtgagcacatggtctctgttctataaattatatccctattcaagtatctctgtatgcattcccctatctctttcattgcatcttttagaaaatggtaaaatacatgaagtcttgaccccagcttcctttttcagatcctaacaatagtaccagctggctttgctgccttgaatggattacccaatcatttattttcaggttcttgcactactgaatagagattaaataagagacacaagtgaaatgccaatcttctactgagagtaaatatttttactctcatattttattttgcttctgtttaatacttttatttgtggtggtgagggcttggatgcttaaaaaccccacttactcgattaaaaattatttccaaaataagcacaataataaaaatatctaaatacaatgaaagcagatagtaaatacaataattggactacataattacatagtgaccaatctacatgttaaatgtatgggctgtcaattggggtctatcaggtggaattaagactttagaacatgagttcaagaaatacaaaatatttttgttgttgttgggctacagtactaaggagtggggcatcgaaacaactactgacaaatggtatgtttacatcgtgggctggacggggaaagaatggtgtttgtgaaggacaatcaccaacttctacacatttaagttatttgctactgaaagaccaaattcacacaagccacagttttgccgaatgaaagcagtgttcacaaaatataggtgtgctaccaaatagagaaaatttttataattcaaaaataaagagcagcaaaaatcacagcaagagaaaacaattttctagtttcttcttttctcctctaagaattttttatgtagcctcaacttattcccttttacttttttttatgtgcatgtgtgtttattgttgtattagataatgtatattcctggaaatgaacatgtaaatgatacttttataagtccaattctactgtagagacatatggacatgtaaagagtttaataattagagaaatttcatattgttgaaaaaaacctcactcgttctttttaattttgtattttctttcttattagatattttctttatttacatttcagatgctatcccgaaagttccctgtaccctcccctcgccctgctccactacccacccacttttagttttcatgtctttcaattttaactttgaaatttagactcaccatatgtttgaaaccatgttattttgctatggtttatttcacttaatgagacctcgagtttctatacacttttctttagaaaggagcattattctgttctttgtggctgaatgaaactcaaaagggtatacatgtgacattgtctttatccattcatctgttgatggacacataggctgatttcatgccttggatattatgaacaatactatgatgaatattaatgaacaagtatcttcatggtacctgatttgagagtgtcttgagcataccagaattgacacaactggatcctagtttaattttagatatttttgagaaacttcacaattatttccacagtggctctactaggcattttttttcttctccaaattaacagtgtgtgaggtttctatttctatctaaattcttagtattatttgttcgtgcattacttcatggttggccatctgccctcttacaaaagagaatatcagtgtagctttactttgcatttctcggatggctaagattattaagtattcttttctcactaagtattttgatagttattggatcaattcatttgctcatttagtacctgaatgatattggtaatttgattttcaaatttttgaaattttctttattattattaattattattatattttttatttacaatactaccattgccccttcaaggtctcccctcccatagttcctcatcctattcttcctccccactgcctccctccttggaacctcaagtctctcattgcatcttctaccacagaggccataccaggcagtcctctgttatatatagagttctggggcagctgcttgtgttatgctgcctggttggtggctcattgtctgggaggtccctggatccacttcttccatccatcccctaattcaaatacagggtttcctgacctcagtccagtgattgggtgtaagtatctgcgtctgtcatatactgtagataacaatccagttgttgatggacacataggatgatttcatgctttggatattacaaaagtacaatgatgaacattaatgaacaaatgtcatcatgatgccctgatttgggagtcagcaacaataagtggacaacaagggtttacctaatctgttggctgtgtctctggtggtagtttgctttgatgggcagaagcttctgatataactgcctactcatgtcctgcttccattttttatttatttatttatttatttatttatttatttatttatttatttatttaggtttttcaagacagggtttctctgcatagtcctgggtgtcctggaactcactttgtagaccagagtggtcttgaactcaaaaatctgcctgcctctgcctccagagcgctgggattaaaggcatgtgccaccatgcccggcttgtcttgcttccattcttgatcagtcacagaagttctgtgcttatgcttacaacttgagtgacttccactcattttcttttagtactgtcaaattttcaagacttccattgtcatttttgctctgctttcagcttattttagttcagtgtgagatagagagttctagtgctctagttctacatgtggattttctcctgttttctagcactgccagtttttgaagagaatatttttcttacattatcttttcgagtttagtaaactatcatgtggctgtagctaggtgattttatttctggccttgtattatattccgttaatctgtatttctgactgtgatgttgccaaactcttttatttattatttctatagcaaagcagtataattggatagaaagcatcgtgacacctccaatattgtttttgctcctatttggagtatattatgctctatatgacctttagcatcactgaaaactttataggagttatcatgaagctatggatcattttggtcatagacctatattaacaaagttatgaatgcttggcaatgatcatggggcatctctctattttctaatgccttctacagtttctctgtaacataaaattttgtattgtgagatatgttttcagactgttcatactgatataacgaatttcatctgtttccttttacaacattctattttatttgtacatattgtattcttcaggtctttcctcattttattatgtaatgatttataatcttttatctttccaaagaactagttatttggttattaattcccagtgaaacaatcttactctcattgacttctatctttgcatttattatatttctacttgttggctttgaacatgatttttcttgttgtcataagtttacacatgcatactttggttctttatttgatttatttctgacatttaatgaaagcacttgagacttaaaattgcatttgttagaccacaaaggatcgaaaagttttcatattaatataaattccatctctttttaaaaaaattactctcttatttaagattataatataattacattatttctccttccttttcacaccttccctatattctttcttgctttttaaaaataaatgcccccattccaaaaattaatgtttaattctactctttatttgtttcgtgccccactgaacaatcaagagcatgttttccattcaatatgtgattgtgttttatattttttattgctcctgacttctagctacatttgattatgacttattttttttaattttttttccattttttattaggtatttagctcatttacatttccaatgctataccaaaagtcccccatatccacccacccccactcccccgcccacccactccccctttttggccctggtgttcccctgtactggggcatataaagtttgcaagtccaatgggcctcnnnnnnnnnnnnnnnnnnnnnnnnnnnnnnnnnnnnnnnnnnnnnnnnnnnnnnnnnnnnnnnnnnnnnnnnnnnnnnnnnnnnnnnnnnnnnnnnnnnnnnnnnnnnnnnnnnnnnnnnnnnnnnnnnnnnnnnnnnnnnnnnnnnnnnnnnnnnnnnnnnnnnnnnnnnnnnnnnnnnnnnnnnnnnnnnnnnnnnnnnnnnnnnnnnnnnnnnnnnnnnnnnnnnnnnnnnnnnnnnnnnnnnnnnnnnnnnnnnnnnnnnnnnnnnnnnnnnnnnnnnnnnnnnnnnnnnnnnnnnnnnnnnnnnnnnnnnnnnnnnnnnnnnnnnnnnnnnnnnnnnnnnnnnnnnnnnnnnnnnnnnnnnnnnnnnnnnnnnnnnnnnnnnnnnnnnnnnnnnnnnnnnnnnnnnnnnnnnnnnnnnnnnnnnnnnnnnnnnnnnnnnnnnnnnnnnnnnnnnnnnnnnnnnnnnnnnnnnnnnnnnnnnnnnnnnnnnnnnnnnnnnnnnnnnnnnnnnnnnnnnnnnnnnnnnnnnnnnnnnnnnnnnnnnnnnnnnnnnnnnnnnnnnnnnnnnnnnnnnnnnnnnnnnnnnnnnnnnnnnnnnnnnnnnnnnnnnnnnnnnnnnnnnnnnnnnnnnnnnnnnnnnnnnnnnnnnnnnnnnnnnnnnnnnnnnnnnnnnnnnnnnnnnnnnnnnnnnnnnnnnnnnnnnnnnnnnnnnnnnnnnnnnnnnnnnnnnnnnnnnnnnnnnnnnnnnnnnnnnnnnnnnnnnnnnnnnnnnnnnnnnnnnnnnnnnnnnnnnnnnnnnnnnnnnnnnnnnnnnnnnnnnnnnnnnnnnnnnnnnnnnnnnnnnnnnnnnnnnnnnnnnnnnnnnnnnnnnnnnnnnnnnnnnnnnnnnnnnnnnnnnnnnnnnnnnnnnnnnnnnnnnnnnnnnnnnnnnnnnnnnnnnnnnnnnnnnnnnnnnnnnnnnnnnnnnnnnnnnnnnnnnnnnnnnnnnnnnnnnnnnnnnnnnnnnnnnnnnnnnnnnnnnnnnnnnnnnnnnnnnnnnnnnnnnnnnnnnnnnnnnnnnnnnnnnnnnnnnnnnnnnnnnnnnnnnnnnnnnnnnnnnnnnnnnnnnnnnnnnnnnnnnnnnnnnnnnnnnnnnnnnnnnnnnnnnnnnnnnnnnnnnnnnnnnnnnnnnnnnnnnnnnnnnnnnnnnnnnnnnnnnnnnnnnnnnnnnnnnnnnnnnnnnnnnnnnnnnnnnnnnnnnnnnnnnnnnnnnnnnnnnnnnnnnnnnnnnnnnnnnnnnnnnnnnnnnnnnnnnnnnnnnnnnnnnnnnnnnnnnnnnnnnnnnnnnnnnnnnnnnnnnnnnnnnnnnnnnnnnnnnnnnnnnnnnnnnnnnnnnnnnnnnnnnnnnnnnnnnnnnnnnnnnnnnnnnnnnnnnnnnnnnnnnnnnnnnnnnnnnnnnnnnnnnnnnnnnnnnnnnnnnnnnnnnnnnnnnnnnnnnnnnnnnnnnnnnnnnnnnnnnnnnnnnnnnnnnnnnnnnnnnnnnnnnnnnnnnnnnnnnnnnnnnnnnnnnnnnnnnnnnnnnnnnnnnnnnnnnnnnnnnnnnnnnnnnnnnnnnnnnnnnnnnnnnnnnnnnnnnnnnnnnnnnnnnnnnnnnnnnnnnnnnnnnnnnnnnnnnnnnnnnnnnnnnnnnnnnnnnnnnnnnnnnnnnnnnnnnnnnnnnnnnnnnnnnnnnnnnnnnnnnnnnnnnnnnnnnnnnnnnnnnnnnnnnnnnnnnnnnnnnnnnnnnnnnnnnnnnnnnnnnnnnnnnnnnnnnnnnnnnnnnnnnnnnnnnnnnnnnnnnnnnnnnnnnnnnnnnnnnnnnnnnnnnnnnnnnnnnnnnnnnnnnnnnnnnnnnnnnnnnnnnnnnnnnnnnnnnnnnnnnnnnnnnnnnnnnnnnnnnnnnnnnnnnnnnnnnnnnnnnnnnnnnnnnnnnnnnnnnnnnnnnnnnnnnnnnnnnnnnnnnnnnnnnnnnnnnnnnnnnnnnnnnnnnnnnnnnnnnnnnnnnnnnnnnnnnnnnnnnnnnnnnnnnnnnnnnnnnnnnnnnnnnnnnnnnnnnnnnnnnnnnnnnnnnnnnnnnnnnnnnnnnnnnnnnnnnnnnnnnnnnnnnnnnnnnnnnnnnnnnnnnnnnnnnnnnnnnnnnnnnnnnnnnnnnnnnnnnttttatcatgtttaggtatgggccttgaattcctgatctttccaaaacttttatcatgaatgggtgttggatcttgtcaaatgctttttctgcatctaacgagatgatcatgtggtttttgtctttgagtttgtttatataatggattacattgatggattttcgtatattaaaccatccctgcatccctggaataaaacctacttggtcaggatggatgattgctttaatgtgttcttgatttcggttagcgagaattttattgaggatttttgcatcgttattcataagagaaattggtttgaagttctctatctttgttggatctttctgtggtttaggtaccagagtaatagtggcttcataaaatgagttgggtagagtaccttctacttctattttgtgaaatagtttgtgcagaaccggaattagatcttctttgaaggtctgatagaactctgcactaaacccatctggtcctgggctttttttgtttgggagactattaataactgcttctatttctttaggtgatatgggactgtttagatgatcaacttgatcctgattcaactttggtacctggtatctgtccagaaatttgtccattttgtccaggttgtccagttttgttgagtatagccttttgtagaaggatctgatggtgttttggatttcttcaggatctgttgttatgtctcccttttcatttctgattttgttaattaggattttgtccctgtgccctttagtgagtctagctaagggtttatctatcttgttgattttctcaaagaaccaactcctcgtttggttaattctttgaatagttcttcttgtttccacttggttgatttcacccctgagtttgattatttcctgccgtctactcctcttgtgtgaatttgcttcctttttttctagggcttttggatgtgttgtcaagctgctagtatgtgctctctcccgtttcttcttggaggcactcagagctatgagtttccctcttagaaatgctttcattgtgtcccataggtttgggtacgttgtggcttcattttcattaaactctaaaaagtctttaatttctttatttattccttccatgaccaaggtatcattgaggagagtgttattcagtttccacgtgaatgttcgctttccattatttatgttgttattgaaggtcagttttaggccatggtggtctgataggatacatgggacaatttcaatatttttgtatctattgaggcctgttttgttaccaattatatggtcaattttggagaaggtcccgtgaggtgctgagaagaaggtatatccttttgttttaggataaaatgttctgtagatatctgtcaggtccatttgtttcataacttctgttagtttcactgtgtccctgtttagtttctgtttccacgatctgtccattgaagaaagtggtgtgttgaagtctactactattattgtgtgaggtgcaacgtgtgctttgagctttactaaagtgtctttaatgaatgtggctgcccttgcatttggtgcgtagatattcagaattgagagttcctcttggaggattttacctttgatgagtatgaagtgtccctccttgtcttttttgataactttgggttggaagtcgattttatccgatattaaaatggctactccagcttgtttcttcagtccatttgcttggaaaattcttttccagcctttcactctgaggtagtnnnnnnnnnnnnnnnnnnnntgtttttgtcgtggaaatactttggtttctccatctatggtaattgagagtttggccgggtaaagtagcctgggctggcatttgtgttctcttagtgtctgtataacatctgtccaggctcttctggctttcatagtctctggtgaaaagtctggtgtaattctgataggccttcctttatatgttacttgacctttctccattactgcttttaatattctatctttatttagtgcatttgttgttctgattattatgtgtcgggaggaatttcttttctggtccaatctatttggagttctgtaggcttcttgtatgatcatgggcatctctatttttatgtttgggaagttttcttgtattattttgttgaagatattagctgtggacagccgacagtgctggggaagagggtggtgaggctccggaggagccccagagctgaagcagccgacaaccaccccggctcgccttgccctccagtccccagcctgcagagaggactaaaacggagtgggactctgcccttcccaaaccctgaatgttcagccacaccttggaaggctccttcgaagggggcgcagccaagctgaagccaccagagcagggaatctcactctttcgtgtagctgtctggtgggtgttcccaacccatcccacccctgctctctgcaccccctccccacttcctccccctgagcctccctcgggcacctgtcggctgtccacaacctgaggctctggacagccgacagtgctggggaagagggtggtgaggctccggaggagccccagagctgaagcagccgacaaccagtgactctgttagcctctataagcagacctggagggtagcactctccttagtttcagtgggcagagtattctctgcaggcaagatctcttcttgcagggcaggtacccagatatctggtgttcgaaccagactcctggcagaagttgtgttccactcactagaggtcttaggatctcgtgtggaatcctgtgtgggcccttgcgggtgtcaggcgactccgctggcaaagtagcccggggctcgagtggagcggaaggggtttgtgccccagatcaagcccgggtagcctgcttccctatgtaccgcagtctcaggttccgtgcgattggattggggcaggtgctgtgttccactcaccagaggtcttaggatcccgtgggcagtcccgtgtgggcccttgcgggtgttgggcaagactctgctggcaaggtagcccagggctcaagtcgagcggaagttacttgtgccccagatcaggcccgggtagcctgcttccctatgtacctcagtctcaggttctgcgcgattggattggggcaggcgctgtgttccactcaccagaggtcttaggatcccgtggggaatcctgtgtgggcccttgcgggtgttgggcgagactctgctggcaaggaagcccggggctcctgattatgacttattgataataacaacatataacataaattttctatctgttaaaacattccttctgtttcaacaactaatcctttttcactaataatcaagtacaaattcaaaaaaactatttaatttctaccaaatgaactatattgcattgatattgctgtacccaaatggctaactttttcttgttgatacaatcaaatatatcaaatatacatgcaactatttttaaaatataatttgtataatgtatattgtacttgtataatgtaaaatgtatatttagaaagaaaaaatacattttaaatctttatatctaaatatgtaaagcaatatctattttacaattcatgctgatatttttattatgttacgttggaacatatatatatatatatatatatatatatatatatatatgcatgtatatatatatgtatgtatgtatgtatatatatatgctgtgtatatatgtgtgtgtgtgtgtgtgtgtgtgtgtgtgtgtgtgtgtgtatacacacaactttattttctactgttttggatatgctacccaatagaaaattaaaatataatataaaatgtgagttataaggctggtgagattgctcagtagattaagtatcttctgagcctgctgatgggcttttgatgctcatgactcacatagtaggagaggattcactcacaaggactgtcttttgatttcctcacacagctgtcacatgcatgtcttcactctacactaattgaataaatgggaaagtaattagatgcctctgtctaataataaaaagtcattaatttaaatataattctattaatttaaagataaattacccattaatttaataaagtaaccacattagaaatataattctgttctttgctttttggtttttcaccccacttgcagttttgtcttcatatatttatctataccttaccgacaataatttcatattttcaggatagtgaaagtgaaaagaataaaatcataacatcctttaaacatagaaagaagtacctgtgatacaaagtaagcaaaatgcatcatgtacactatatgataacacacacaactttgcagtcacacaaatacagactcccagtggtccaggacaaacagaattaaaatttgttttccctgtgttcctaaggcacactgttctttattgcatatttttcatgctgctaaacattaacatttattgagaaaaattttaaaataaagtagtgcatctttgagtctcatttgagcttttctttcacacggtgtgtcacattaatgctaccctacagggaaataatcaaagaactttaatgtaatactgtgcttcagaaaggaaacatgacagcagtacattactgcaaattgaatttaatgagcttcttagcactaggaaagtgactctttgaaactgaagctattcaatcgagagcattttgattataattaaatcattttacatttaccacagggacaagtttaatcttaattagacacttttatgggaaggtgaagccacatgatttatattttcttgatcacataaggagagattcataatgtaaagaataaaaaacaatatggttgtccttttaagagaaaatgaatgtacacattctcatggtggcttcctaggaagagcttggcaagacaatggcagtgattgcgccattcatacgtgcatatgcatcagcagatggagaaatgacacctgtattcatcttattgtccatcctgtgatgattttaaaatatggaaatcacatgaagtgtcattacattgagtgacacagtcctttctgaaaaccaccagtaccatcttgtttcagcggaaagtgctttataattggagtctcaagatgattcacacactaattatggcatttggaagcttttccatcttgtgtaaataatttaatctcttgggatgatatttcattgcctctttggtaagaataatacactctgctcttcatgaaattatgtcagtttatggaagatatgattatcaagttacattataaactttagaaggattcttagttgttgcatattaataaaaatactgtaattatgatatttccggaatttgtgatacacagagctaagaagatcttaatttgctcagtacacatgtatatgtaagtgcatatcacaagccaaggtagtcctataattgatgtattcctaatatccaaatcctctctcactcttaagctaaattgcatggtaatagagtaggattctccacgggtttcttgaggattaatgttttctgttaaacaaaagtaagatttttttcctagtttaccttcattcacccatgatattcaatcatttctaaattgaaacacacagaagcgatctcccccccaactccactcaggaatatctgttaagttcaaaaatctaaagttccatcaggaaaagttgtactggacatttaacaagtgttctgcttttcataaaagttgtcattaaagaaaataaaatgtcattcataataaattaacaagaattctctgtgtgtatatatataactgattcttcctttggtaatttggcaagataattcttgtaataattgtatgaagtcagttacatgttcagttttgattaacaatggaatggcattgaaaatgaaacgtttgaatgagttgggggtaaaaccccatcattttcctagcatgagctcctgcttttctgactttatattgaaacatgttggacatgctgaactttgagtcttctgtttgtttgtttttgtttttatttttatttttgttcttgtttttaatttattagttattttcttcatttacatttcccatgctatcccaaatgtccctaacagcttctgggacaggtggaagccacacaactttcgagtcttttaaaaatttatttaattcatagtaagaaatgaattgatgggctttttgcatttctcattgacaacattcaccctgccaggatatttggtaatttatttagttttttttttttcttacgaaaatgatttgatacatttgactactaattcacttctaagaaaattttgacagctccatggttttagagaggaggatggttcagtccatattttctagtcttaagtgagtgattctcttgacattgcttcaggattctcctaaattaatgctttacatgaacgagaataggaataggaagaataccaggacactgattttattgtctatgccatggtctaagtgtggaggtaatgaggatcaggaagggacctatgtaaacctgcctttgataccctcttaactactttccttgtaaccactcacctgtgttccctttcatctcgccagtgatttctttcttttcacccctttttgtccttcaatttcttcctaaaaataaagtctagagaaaatatcttaatcaaggagaattgattctcccttaaagcctccaaaaaacaaacacagttcctgagaacactttgaccttggtcttgcaagaaccatttaatgttctgccctcctgaaagtatgattttaattgaatgtatgattactaaagaaactatatggtttcaggtttcactcaggttggtgagtttctataaagatgtgagattcctgcctttctgaagcttccatcctggaaaaagatttcatgaccaccacagggagatgagcattgtggacaaaggaaaagtgattgaatgagactgaatacaacattgggatggataaactgagttcatggaatcaattgatataaattccctttcataggatgcatcatgagaatatccctgattatcaaaaaaaaaaaaaaaaaaaaaaaagagttcattttgccttctgtgcttgcattagatagtctatgaggtgttcatatacagaaaatgaaggcattatttcttttgtattctgtaactaaaacacaatgtttgaactgttaacatttaaaaagaagactgcctaggtcagaaagtagagtaaataaaatttaaagatagagatcttgggctcctaggacactgttggctactagtatgttcaaagagcatgaatgggtataggtggctccagccatcttggacttaaggactgtgaaaacaagttccatctgtgactgccctgcctgttaagggcagcaagcactgccatctcttgaccataatacaggcccttaaagcagcttagctctcccagcactccctgcaacctacctggcattgactctgaggaagaggaggagaattaacgagaggagagaggaggaggaagaggatggggaggaggtagaaaggaggaaaagaaacctccaaaggccctcatttgtcaaaatttcaaaggaagtaggagagaaaagaaaaagagaaatgtcaaaaaacagacctaatctctcactgacactgaagaaaggaagaaggaaggaactgacacagacaaggtcctcttggtgggatttctgctgaaggagaaaaagtaaagaggaaatgccagaaatagtcctcctatttacacccagcccagcccctcgaccgtgttgaccaaagagttcagaaattgaggatgaggacaagtactgctacagctgacccacccaaactaagctgtgagtccatgtcacctaactctgcacaccctctgaactgtaaacagtggcagaacaggtagaagaataagcacagacagaggaacaaatgtatgccacttcagataccagaccaggttcattccaaggcttccatagaagagactgaagtgcctctggctacaaagtcagacagtagagactagaacttgagtcctgtgatcacacatgacccaatggctggatggggccttttttcactaccttaataaacagttgttctcggggcctagcagtgctgcccaacatctattccaggaaatacctaaatcttttcgcctatgtttatcattgtggttttccaagacaagtgaagaatacatccagtggactgtattgccaaagatctgtgccagaaacgtccatccttggtggtaactttggctgtggagaatgcaacctagcttcaagtgtcaggaaccctgttcactgctttgatttggcttctctgggcccagggtcattgtatgtgacaaggcccatgtgactctggaggatgaatctgtggctgtgactgtgttttgtctttcactaatgggaagtaacattagggacttctgtgaggaagcaaatccagcactaaagccagggcactttacaaagtggctgaagtcagcaggcactttgaggatagcagaccttttcaagaactgtgaccaaactcagctttaaagtcatctacaagacccaaccgacagtcacttcttgtttgactgaaaggattgagcctcccagagtagcacccagagctatttcaggccttataccttagccttgtctctactggcacatctaatggacatcagttgaaagggagaactcagactccaatctcagagctctaaagactgtaactacccagactatgatccaaaatctggtactatcctccttctgtaccaagaacatgtgataaaggctccagctcagctcttctcaagtggagccttcttggctatagaaagcatgaaatttcttggacagtctcaagaatgaagagtttattgtgagggtatggatgtatatgggacttgtgggtcacttcaggtatcatggaatgtgattagctggcaactgttggatctttggtttggtttctaccatctctctgaaggcaaattggcattccactgcgctgttttctgacctgcattgtccagcctctgcccatccatagtttctgagtcaagactacagacaggtggtttggattaatgccaggtcccaaagctagtttgccacttggggctgggaatatttaatttctttcttagagctgagaatcatttgatttttgtttgttgttgttgttgttgttgttagtagtgggatatgttgttgttgttgttgtgagacagcatctcacgctgctccaggctgatctcaaacaaaacaaatggcaatcctcctgctttcacatcctgattattggtattataggcttcatccactttatccagttaaagaaatcatataatttctaaatattcatttctcatttgaaaagtgaaaaattcttgtcttacattatgttggaaggattaactgaggaaatcaacagctaaggctaggaacattaagaggcaaacaagctatggctataaaatattaaaactaaatagaagacaatagaaagagttatgaagactaaagattgagagaagaaggccacaaaggtgctgattgagtaaaattacaaagtccaagttttaagaacaaagttttgtcataaatttgatctattttatttccatagtctagccaaccaaagtatggcaatcatgcattaatcctatatgctgcaatgtcaggtacaatgttggatatgctttaatggctcttggggccatattgtctcattaaaatagaatctcctcaatagataaagatgctttgtcattgcctagtagcacttagaaatttaattgtaagatgtctctgaatagtcatcaagtaggtaaaggaaaacaacaaacaccaacataaaggagtgttagctgggccatttgatttatcatatgtggcctctgattttctgaattattcttattgatggactgcaaatgattgctgctctcaaagtatttatttcatcaaactgaataaaataatgtgataaaaatgtgctggataatgttcacagaaaataagaatcaaaaacttagggaaataaactacctcagttagtatccaactcatgctgattcaaataatatcaccagtatggatactattcaagtctcctcagctattctaatcagaaagtcgaattctcctgacattctgtttacctaatttttcttttatttcctttgatgaagacctataggtattagagattacagggctctattttacactgagctcctagttctgttacctctgtttacatcagtgcagagcagatgagagctgaacagggcaatagccctagcgtgcattgccttctatctcccaggtagtaaatacaattgttttgtttttcgaggtctaaaatgactagatatcagcagctcacatcctgcagggcaaatcaggatgtgacataaagtgttcagaattgctatgttggcatcgctaacagaactgtaatagcggagtatttgggggcacaagagggttgttggcaatgtcaactgctcatagtgtggtggagaacagacagggtcattgtttttgctcagctcccgatttattttccctcctttttctttgcctggggaattttttaaagatgaattagctcctcctccaatgccatggatgtattgtgattctggagtttcctctcttcgtgtatctctttccaagttgtttaaaggtcgttttctcttatcaactctttttctcagaaagtttttaggtttacctggcttggttgtcctttaagtaatcatgataacttaaatgatctatttagtagaaaacaaactcagtagactgcatatatttaagactgcaaatgagaagatataaacaagcaaaaagtgttaatatgtaactgtggctttggagaaaccctccttcaataaatacatatatttgctttcatttgtcactgcatgtattgttatgttgacattaccataattttctaagaaatgtctacccttgaaagctcagtgtatgtttgtttttccaaaattgttcaaagatgatgctaattatattatgtatctatctaattttaaaatatcctctctccccaaatatcatttttgtgaaagcaagtttatctcattatttagattttatttacttataaattatttctcatatctataaaacatatatatatgtatatatataaatatatatatatatatataatatgtatgaatcactagcttttttctattgtcctacaataatattctctaaaccctatgttgtttgtacatacatatatttaggactgcaaatttattgcatacttacctgtactgctacagatgttaaatgcacatggtctaatgaggacactgagtatctatctccctttataattcttaagttcattcctttgtgataggatctctcattgattgaggagctcactgacttggggctatgctggcagcaagcaacgctctgcaaatcttctgtatctgtctctcacacagagctagagtcaaaggcaaatcctggcatttgccctgggttttgtgaattgaatctagtgctcgtattagcgaagtgagggctcctaccaactgagccatcacccacaaccatctgtgtccccttcagtgaagaggacaagtacttgcagaaatctactccctctgtcctctacagaaaataacatcaaccatgacagattccatgaaaatctgtaaaatagcagagatggcattcagctattccattacttatgctctcatagactgctagtttcttttttctttcacttgtggtttatatatgatgttcaagaaagttcctatgagctaggaggaaattaatgtggtatagcaggcttttctgcaggaattatacaaagcaaatattctgaaaattatcaacccatcgtagaaaaagaaattctggtatacctactatttagagctccttaatgctttttagaggtttttctttaaatcctggattcactaacaaattttcaagtgtctccaactttcttggccgctcttccacatcttaatccttaattgttcctgttttaagtatgttgaactgtgccctgaatgtcttggaaaaagtaagaaagaaacagaaagctagagaactgcaacgatcttactttcaaagcagtgtgaccttttgttagaaattgcttatttttctgtccatgggaaaatggagaagaaacaaagaaagcagagccatgcttactatgtccctccccttccttctatagcccttctgcctgacaactgacaattgaacacttcaactgacactgtcaacaaagctattattccacccattggtcagtacatgttcattttctgtcagatgcttagggaactgaagcattatatgctgatctgtctcttaggttatcagggacactagcagttaatctgcattattcacaaccttgatgatcaaagacttaaatcatcattcacctccatgaaagcccagagacaaaagaccatatagaaatgactggcagttattttctggaggaagaaagatagttcaatctcaaaaaaaaaaaaaaaaaaaaaaaaaaaaaaaaaaaaaaaaaaaaagtaaacctgcagcttttatttatgagaaataatatctccgtcttcccacagagacagggccacagcaaaactcactgtaggcaccacatctctgtgtaaaattataccccatggacagtcacgaaagttctcttaagtaggtatttagtagccccttgattggttttttaaaggttatttgaaatatttgaacacttgggaggagactttgagagtgcaattaattttttctcaaatgttagtgcttgatcttaatatattaaatttactattgtgtataaactatattataaaatgtgttttagttttcttcagactagtaaccaatagaaacccttaagcgttctatttgtcaccacatttttctgaatgtcttcacctgagttcaacacctttgggatgattaacctcactgcacactgattaccttactccacagcatattagtgtgtagttgtttttgtaccctcttgtgcaattgctctgcattttgtttctagttttcctgaaagcctgaaggtgcataactcactgagttgctgcgggttttatggagaacatatgttgcgtcctactcaaaatggtctccttacagttctagagctgcacagaaaaatgaacatttggaagagggaaaagcttgagtgacatacttagcccaggggcagtaaataagacatcggctctgagtcctgaaagccctctgcagcactgctccaatgctgactcatggcagtagacaatggacattatgagatccaatacatggtttctttagttattctcaagttttaatattgctctgtttgcctctgacataatttatcttgtaatgaaattaacaatctgcaatcttgtgagactgcagtctagtgaggaaactgatttcgataaatatcctgcagtttatggttccaaaaggggtttcttccattttgctttgttaattagtgatatctacttagcctcttgaatcatttgaatgtgaagttcttttatagaatctctatgtttcaaaagtttcatagttagaatattaggctactagaaactcacttgaacacccacatttttcttttaagctctttctagaactatttattttcccctaagttaaaatatatgcacaaagaaaataattttcaattgtcttacttgaacttttattatcatgttgtggttatctctgtaattttatgatgtcatgttttgggttaagagtaacttgaacaagtattcttctatgaagcgttttatttaacgagtatgtttgaagtgaaaacttcatcccaagactggtgttgagtataccagtttgtgttagtaatctttctatcattataaaagaaatcctggcagagcaatggtggtgcatgcctttaatcccagcacttgggaggcagaggcaggcagatttctgagttcaaggccagcctggtctacagagtgggttccgggacagccagggctacagagagaaactctgtctggaaaacaaaaacaaaaacaaaaactcccaaaacaaaacaatgacaacaaaaaagacatcctgagctaatcaacttctaaagataaagaggcttcgttaggttcacaggtttataggctccaatatgtacccagctgactttgatgacaaggcaaaatcatggaggaaatgaatagtgaattatacctgctcatgtttaaaaaaagaaagaagacaactggccactcatcccccaagtaagattgcacagtgatctaaggagtgtatactaaggtgtcctccctaaaaagtctatatatcccccaaagcatcatccagaatcctaaactctaacacataggcctttctgagacattcagtattcaaactacagagactggtgtaatgacaagatatacaggggaagaaaacagaatcacaaacaacagcagcagcccaagaagccagtccacaaacttatagtagcaggcaccatttgggaaatgatatttgtcccttccagctcagtgctaatcacagaacaccaaacatgctctatttgccaacactatcaaaattctggtaattctatatctaggttctccatttcaatatccacaatcagaacagattgaaacctttccattttttgttcctatacaaagatttctaatccttcctaatgactttgagcatctgtcaaattcaagtaatggtgagtgattctcttcctttagtaagttttgcataaacagactgtacctagtcccatttgggaagtttccattaacattaacagcccaaatatcattgtctattgcatgttgtatcattttggatatatttcttagctttggagattcatttatttattgaaaatagagattataatagtgcccataacataattaatggtcagacccaaccccctccagtaaacatgtggcttattgtcaatacttatgagttctaagtttgactcgttactctgtagtttgataggatacaagaagaggttgaaataacaatagattaaaattcaaagagaatcattatatgagttctgtgcagatttttccctatgtccaagtcccttgctacctttccctacattaagtatccattcctctacatacagagtacaatctgaaattttttaaatgaatacacaaaagaataagtaaattagtgaagagacaaagttattgtataagttgcagatgcaactatggttacatagagaaatcaatctgtcaaccataaagtgcatgtatctccagatctgagttaaactgtataaggaggcagatgatttcagaacaagaatgtatattaatgaccacttaatccaatgattttcataaacttttgaactacacagtaatagaaattcaaaacagaaaatttcaacagtgatacctattaggaacaaacaaacttagactaaattataataataggtgctcttatttaccaaggaaagagaaacattcaattcttggttccatctctttctaccaaagaagattgtggagaatattatacattaactatagtttccagaggatggataaaccaaggacacatttgagaacctactacagctctttaacaaaacttttatgtttggatcctgactaaaatggtcaccgaaaacagaagttttgtacaacatttttaagtgtgtgtgaggaacagtcccatacaatatgcaggttagctgaaaaatacctaaagagaactaagagaaaatgtattgataaatacattagtgctgtgagcaaggaggatataattaagctgaggacactttagaatagtgtgcagactattctcattgaggcacaacttgaagaatggcaacgtctggacagatttttttaaagggtacagatactttgatgacaagagaatatccctactcaaagaaagtccggaagtcatatggattcctgacaactcctgacaggtctcctccagtgaaaggcaaaaggtgagccgcgctgaacataaaggctccatagaggctaaacttagagacaggtagtttaggatcttcccttcaaatttaagttcttgctcaaaataatggtattctaaaggccaatatgtagttaaaaatgttattttatttcacttttacatttattataagtaagagaggaggttaatactatgtggctaatatgtaagctgataaaagtcataacattaatgggattgctgtgttaattccactaataatataagaaaaaaatcagttcttaatatttgtaccttcattttccagatggagttagggggacttttatataatgttggtgggtatgtcttgttgaaaactatttccttctctgtgtcatggattttcatgattttttttactgtacttgatttacttgtctattttgaaaatatatactaagtaaacatacgtgtttattttcagtatccataacattttcaaacagtccacagtcctcctagaatttgatatcaatacttttaaaggccacatgtaaatacttggcaaggacttttaaacatcatgcaatgttaattttatttcaaagacaacagtcccacccaaaacatgcaatcccatatgatgacaaacaagaatcttatgttaaagtaccttgtttttaagcactgggaactgaacttagggctatacatatgctaaataaattgtaggtaccactgagctaatgccagccttcctatgtctaagcaattctaagatattaacttattcacacttctcaagggctgtattgcatatttttcttgttatccttattcgtttaactctcaaacttcttactttttatttttaatgtatttttaaaatttgctgtacatctggatcatatctttccatccttcttttccttcaaatccttccctctttttctactccttcttcctcccgttctccctttcttctcagaaaagcataggactcccattgatatcaaccagccttgtcatatcacgctgcaaaggaacaacggatatcttctcctactgtggctagacaaggcatcctagtaggggaaagggatccaaaggcagacaacagactcagttacaacccatgctccttctgttaggagttccatatgaataccttccgatagtcttcataaccgttacatatgtgcctagggcctacacctgacacatgcatgatctctgtttggtggttgattctctaacggccgctatagacccaagtttgttgattctgtagattttcttttagtgtccttgactcctctggttccttcaattcttcttctaccgcttcagtgggatttcccaagttctgccttatgtttggctgtgggtttccattggatgctgtgtaaagcctctcacatgacagttatgctagacaagtctctgcaagaatagcagaatatcattaataatgccatgaataggtcctctctgatggaatgggtctcaagatgagcctttttcactgatgagttgcctgagaccaacagcaccccagttcagtacactgcccagggatacagagctagtaaatagtgagattaagatttataaccaggcaaagtgagtgcagagcctgcaaagccttcaatcactcctgaataacttttcataatatgcttctgaaaggttgtattaaagctgtatcactgcgaggccctgggcagcagaaggagcccataattcttttgatgcatcaatctctgccatttggtccctccttctcatcacattgacccttgctgctccattgcgtggaatccagcaagtgttacttgggtaccaggatttctatggtcatgaattttttacaaatgtactcatttagggtttaactcaaaattattgtaaaacataaacaatctagtagtcactgaacagagaacgtcagcactaaacaagctttgttatcaatgatcatatgtaagagttattttaatgccattattattaataggtttagcatgatttgttatatttgagttaaatacacatattcttgcatgccattgttaaaacacacggtacagatactacactcttttttgtttgtttgttttaaaaataaaagaattaaaacagctaagactattaaaactcttaagattgaccaggacgaataataagaaaaataatcaggcagacctaaacttcaatctcacattgtttcttatttggtaagtttaggcaaagtatgtagtttttctaaattctcatttgaaaaagtaaaatatctacattatttatttattattattaactactgttattattactatggagacagggtccctctacataaccctggctgtcatggaacttattaattagaccaggtttgcctaaaactcagagatttctatctgcctctattgcgattaaaggaatgtaccatcatacctggtacacaattttattactgagaaaattaattttggggtcctttgtttacttattcactagggtatggtagcaatgtctttagaagttttcaacttgtcatttttttaaatgatttgttgtttgtttgtttgtttgtttgtttcctattttagttttgtagccaaatcagaaacaccacagtaagactaaccaacagagggtttgaccttgttatctcctaggcagcaaaccatcctgcgtttcatgccaagctttccagagaaaacatccaccatactgtttaatgtgtctagagtgtgtaatccagaacatatcttcttgagtttgataccactgctgcttgagcctgatacacttgttctttgtctttctctgcatccaaggatgtttagcagaatccttgccttaacaaatcctttttcatggaaaaaacaccccataccttgctgtgacattaagcattgccaggttccccagggaagcatcagttgtttagagagattcatacacttttgtcagtcagcaaagtagaatacaaacaggttttccttgccggctcataaacagctcaactaagtaaaaggagagatagaacaagagcatagtttctataagtttgaactgctaaaacacagcaccatagataatggtggcttataaatagaatgaagtgatttctcacagcattggaggttggaagcaagagatcattgtggtagcaggtatcacttctgattagatttcctccttcactcatatcttatgtctttccacaaggaaagaacagagggagctagtcttctgatgtcttctacaaaaataatggtcccatcatggtgactcttcatgcatacaataattatgtagcaaatcggctccttatatgtaaaatcttagcaaggttcagatccaggaattggggagaaaaacattttatttgaagtattgctgttttatcttgttggttttaatctgggagcctttttagctttctgaattactaaaagacctcatattagaaacagaaagttatattttagaatatgaatctacatacaaagttatatatctgttctatcaaaagagatcatggatttgaaagggagtgagaactaatattgggaagggcttggagataaaaagtgaagggagaaacgtttttaattaatacagtcacaaacacaattaaacaaaataatattctctacttttaaattgaaatgagaaagactgactgaagaggaaaaccccagctgaagtatcattttatttctttgtattgccagcacctctgtaaagaggtactggaacctctgccaccttgcagtcatcaggaggtgaaggttttcttttcccaccacctcgagggcaagtttaaattgcttttgcttatttggttccttatggaaatagttgaaagtcattgtggttcattatgtgaagctgtaaattgacctctttctagtcagacacatctcctaaggatctgcactatgcagactggccttctctggaacactctgtgtcctcttgcagaagattgtcacagatttttactcccctcccctctaacctggaagaggttcttcctgtcacagagcatccattcctgtggctattgcaaactgagctgttggccacctctgtcactgctatcttcctgggtgactcatggtctgctttgtagacttcttgaacatcctaatccaaggctctcaacatttaatgtcttcccgaagtcttaactttaataaataacagttggaatggatgaatggttgagcaaaccaaagcttcctaatcacagattataaagggagaaggattctttttcttaggcagggggcagttgaagtctgcacatggggtcctctatattctcaggtaagcataattaggaaagatcttgaaatgcctctgtcaaaaccagttgcatttccatatgatagtatttccatattcagttctgcttccctctgaaggttatgtgagtgatagggtctaccctttgccccttagcatggtctccttttcccacccagcactacggttttctatttccttttatgaaatgagaaaaatctatgaatttctattcctacacaaaatctactgctgaatgactgacaaaaaataattcaaattcttttcataaagtgcaattccattcattgccatgcattataatggaacaatagtgattacattatcagcagggaaaaattctgtaaagctggactgttcttatttaaattttgtttatccaggtatttattataataagataatatttcactgtgaattagcaatcgagcgagatgttccagttgtttgtaaagtttaattctatagcaaataataataataataataataataataataataataataataataatctcaggatgtagcgactgtgacagctaatgaataaataggaagcttattttcaactcatttacgcattaggaaatgtaggttttagccttcattattgtatcacattcaataaaattatagacaggctttgtcctgataagtgaaatcatttgcatgcatcaatcacagcaagaaaaagtaagtttcacgtttctcatatattaatactgatgggcaatttgcatttagcttgacagggtaaaggagtgcttcacagcacaattagtcagatcataatgcttgaaaagagttggatgtttaatcaaacaattttcattttagcaacaatatttacttatcacagtgctgaacactggagctttggagagcaaaatattttggaatttggggacatcagaggaattatcctctcaatgacaagtggagatcatctgtacactaaacatcaggtcttgacattttcatttgaataacaagaattcttgaattgaagagacctgtgtcatgaagtcaacatgtaaagacagtagtatggatttggagtcctaatctgaatgaatctccactccattgtctatcagccgtgtgacaatatccatgttttacaaaatctctaacccggtgatacattttcctccgaatgctgctcctgaggtagcttttaatatggccaatgcccttgctgaaatgcctgacaatggggatatggaacctgaagagacaacctcaagtaaatagacagagcccccagtggagggatgtagtcaccaacttacctgtctaaaataaatgttcctgtctaaaataaatgaatggagaaaattagagcagagattgaaggaaagcccattcagtgactggcccaacttgggatcaatcccaagagtggtaccatgatacaattattgataccttgatgtgtttgcagatgagattgtatcatggctgtcctctagaggctctactagcagctgactaagacagatgcagatacttaaagccaaccattggactaagttcagggttccctatgaaggagttaggggaattaaggagttgacctggatggcaactgcataggaagaccaacagtatcaactaccctggaaccctgagagctcacatagtctaagccaccaaccaaagctcatacacaggctggtccaaggcctaagacccctggcacattatgtagtggaggatgccttgtctggcctacatgggagaagatatacctaatcctgtagagagctgataccccagagaaggggaatatgtatgtgtttgtgggggaaggtgttgatgtgggattgggtgggtgaggtgggtgggtgggttgatgaggtcagtgggtggagggatggaggataattagtggggaactgggggtagggatgggcatgtagaaaagtggggggatggtgttgcatgctatcagaggcaaagggaagggggagagggtgaagagctcttggaggggggaccagaaaagtgggcaacatttggaaagtaaataattaaaacaagtaaaataaaatgccaatgtctaggcataatgtatctcagtacaaaatgtcacttgctctgaaactggacaactcctattcagtccctgggacctatgctgtaggagagaatagacaggtctacaaactctcttttgaactctacaagaacacagtgcaacacaaacacacatacacagagagagagagagagagagagagagagagagagagagagagagagagagagagagagagaagacagagactccaaagtagttgaaaataaaacctcatttgtcctggcactagatgatttatgggttaccttcagggtgatttcagtaagcacataagatttgtagttattagtatagttcgctgttttgcaatgataaggtggatactaattgcctggttagccaggacaagtctatattcttacacaagaagtctgcttatggattggactttctacttacttaacaggtatccaagagatgacaatgtcaacattttggggtgttagttgcatttttattttttatttttttttctccatccattctttttttttttaattttttttaattaggtatttagctcatttacatttccaatnnnnnnnnnnnnnnnnnnnnnnnnnnnnnnnnnnnnnnnnnnnnnnnnnnnnnnnnnnnnnnnnnnnnnnnnnnnnnnnnnnnnnnnnnnnnnnnnnnnnnnnnnnnnnnnnnnnnnnnnnnnnnnnnnnnnnnnnnnnnnnnnnnnnnnnnnnnnnnnnnnnnnnnnnnnnnnnnnnnnnnnnnnnnnnnnnnnnnnnnnnnnnnnnnnnnnnnnnnnnnnnnnnnnnnnnnnnnnnnnnnnnnnnnnnnnnnnnnnnnnnnnnnnnnnnnnnnnnnnnnnnnnnnnnnnnnnnnnnnnnnnnnnnnnnnnnnnnnnnnnnnnnnnnnnnnnnnnnnnnnnnnnnnnnnnnnnnnnnnnnnnnnnnnnnnnnnnnnnnnnnnnnnnnnnnnnnnnnnnnnnnnnnnnnnnnnnnnnnnnnnnnnnnnnnnnnnnnnnnnnnnnnnnnnnnnnnattcattctttttaatagctgagtagtactccattatgtagatgtaccacattttctgtatccattcctctgttgaggggcatctgggttctttccagcttctggctattataaataaggctgctatgaacatagtggagcatgtgtccttcttaccggttggggcatcttctggatatatgcacaggagaggtattgctggatcctccggtagtactatgtccaattttctgaggaaccgccagacagatttccagagtggttgtacaagcctgcaatcccaccaacaatggaggagtgttcctctttctccacatcctcgccagcatctgctgtcacctgaatttttgatcttagccattctgactggtgtgaggtggaatctcagggttgttttgatttgcattttcctgatgattaaggatgttgaacattttttcaggtgcttctctgccattcggtattcctcaggtgagaattctttgttcagttctgagccccatttttaatggggttatttgcttttctgaagtccgccttcttgagttcttctttatatatatagttgcaattttataaatattgcaatttctcctaaaccagctagctcccaaataattaacacaggactactgtatttatttaacagctttaaggtagaacagctgagcaatattttttaaacaacatttttattagatatgttcttcatttacatttcaaatgctatcccaaaagtcccctatacactccccgtgccctgcttcccaacccacccactagcacttcctggccctgtcattcccctgtacagggtgcctaatctctgtaagaccaagggcctctctttccaatgatggccaactaggccatcttcagccaaaatcttccagatactttcatgtgatagcattctctgctctagcatgctcatggtatccactggaccctattcttgtggccgatttcccacttattctttctccttctctctcctctggcaggaataagtccagtcctttcctcttccctactcagtcattggctctttattgaccggtcatagaataattgggtagcaatgtttattcaacactaagataagagattctcagaatatggactgcaaccgaatatggggttacagaaatcagcctttgaataatataaggataatctgtacacagtacacaataatattatgcctatatttggggccacagtttcagttgcaagatttcagtttctgtaatgcttctgtaaatgctggatgtcagaaatgaaaacattcatataaaaattcatttatttttaccccttgttttttttttattagagaaagggtttctctgtatagccctggctgtcttgaaactcattctgtagaccaggctggcctcgaaatcagaattctgcttgcatctgcctcccaagtgctggtattaaaggtgtgtgccaccagtgcccaagcatttattttttattagtttttaagcttatttttattaggtatttatttaatttatatctccaatgctatccaaaacgtccccccatggtcccccaccccactcccccaactacccactccccctttttggccctggcattcccctgtactgaggcatataaaatttgcactacaaatgggcctctctttccactggcggtctactaggccatcttctgatacatatgcaggtagagacataagctcctgggagtactggttagttcatattgttgttccacctatagggttgcagatcccccccaactccttgggtactgtctctagctccttcattgggagccctgtgatccatcaaatacctgactgtgagcatctacttctgtattgctaggccctggcatagtctcacaagagacagctatatcacggtcctttcagcaaaatcttgctagtgtatgcaatggtttcagcgtttggaagctgattatgggagggatcccatatatggcagtgtctagatggtccatcctttcgtctcagcttcaaactttgtctctgcaaatccttccatgggtgttttcttcccaatttcaagaaggggcaaagtgtccacactttggtctgtgttcttcttgagtttcatgtgtttcacaaattctatcttatatcttgggtattctaagtttctgggctaatatccacttatcagtgagtacataccttgtgagttcttttgtaattgggttacctcactcaggatgatgccctccaagtccatccatttgcctaggaatttcataaattcattttttaatagctgagtagtactccattgtgtaaatgtatcacattttctgtatccattcttctgttgaggggcatctgggttctttccagcttctggatattataaataaggctgctatgaacatagtggagcatgtgtccttcttaacagctggaacatcttctgaatatgcccaggtgaggtattatgggatcctccagtagtactatgttcaattttctgaggtactgccagactgatttccagagtggttgtacaagcttgcaatggaggagtgttcctctttctagacatccttgtcagcatctgctgtcaactgaagttttgatcttagtcattctaactggtgtgagatggaatctcagggttgttttgatttgcatttcactgatgattaaggatgttgaacattttttcaggtgcttctcagccattcggtattctcaggtgagaattctttgtttagctttgagccccatttttaatggggttatttgattttctggagtccaccttcttgagttctttatatatattggatattagtcccctatctgatttaggataggtaaagatcctttcccaatctgtgagtggcctttttgtcttattgacagtgtcttttttcttgcagaagctttgcaattttatgaggtctcatttgtcgattctagatcttacagcacaagccattgcttttctattcaggaattttccccctgtgcccatgtctttgaggcttttccctactttctactctgtaagtttcagagtctctggttttatgtggagttccttaatccacttagatttgaccttagtacaaggagataggaatggatcaactcacattcttctacatggtaatcaccagttgtgccagcacagtttgttgaagatgctgtcttttttccactggatggttttacctcccttgtcaaatatcaattgagcatatgtgtgtgggttcatttctaggtcttcaattctattccattggtccaattgtctgtcactataccagtaccatgcagtttttatcacaattgctctgtagtacagctttaggtcaacaaacctaaaagaagacagaaacaagaacaaaatgccaacattaacaacaaaataataggaaccaacaattacttttccttaatatctcttaatatcaatgaactcaactccctaataaaagacatagacaaacagactggctacacaaacaagaccccacattttgctgcttacagcaaacccatctcaggggaaaagacagacactacctcagaatgaaaggctggaaaacaattttccaagcaaacggtctgaagaaacaagctagagtagccattctaatatcaaataaaatcgacttccaacccaaagtcatcaaaaaagacaaggaggggcacttcatactcatcaaagataaactcctccaagaggaactctcaattctaaatatctatgttccaaatgcaagggcagccacattcattaaagacactttagtaaagctcaaagcacacattgcatctcacacaataatagtgggagacttcaacacaccactttcatcaatggacagatcatggaaacagaaactaaacagggacaaagtgaaactaacagaaattatgaaacaaatggatcaaacagttttctacagaaccttttattctaaaacacaatgatataccttcttctcagcacctcatggtatcttctccaaaattgaccatataattggtcacaaaacaggcctcaacagatacaaaaatattgaaattgtcccatgcatcttatcagatcaccttggactaaggctgatcttcaaaaccatagccaacattcacgtggaaactgaacaacactcatctcaatgataccttgttcaaggaaggaataaagaaagaaattaaggactttttagagtttaatgaaaatgaagccacaacgaacccaaatttatgggacacaatgacagcatttttaagaggaaaactcatagctctgattgcctccaaaaagaaacaagagagagcacacactagcagcttgacaacacaccgaaaagctctagaacaaaaggaaacaaattcacccaagaggagtaaacagcaggaaataatcaaactcaggggcaaaatcaaccaagtttaaacaagaagaactatttaaaaaattaaccaaatgaagagctggttctttaagaaaatcaacaagataaataacccttagccagactcactagagggcacagggacagcatcctaattaacaaaatcagaaatgaaatgggagacataacaacagatcctcaagaaatccacagtgccatcagatccttctacaacaggctatactcaacaaaactggagaatctggatgaaatggacaagtttctagcagataccaggtaccaaatttaaatcaggatcaggttaatgatctaaatagtcctatataccctcacttgataccctgtcttcctgctggatgtgggctctataagttccctcttcctactattaggcatttcatctaaggtccctccctttgagtcccggggatctctcaacttccaggtgtcatatggagagtcccctcaatctcctacttcctgagtggtctgtttccattctttatgctggccctcagagcttcagtccttttccctcacctaataccagatcaggttcctctcttccacctatcctgtccactttccctcccaggtctctccttccctccctacttgtaactgttttcctctcccacccaagtgagactgtggtgtcctcacttggacccttcagcatattgaacatttttaattctctggactgtaccttggctatgctataccttatttggttaacatccacatatttatgagtactttccctgcatgtacttttgagtctgagttacctcactcatcatgatactgtctagttgcattcatttgcctgtaaatctcaagatgtccttgttcttgatacctgagtaatatatcgttgtgtaagtgaaccacatttttgtatccattcttctgatgtgcaacatctgcattgttcaaaaacaaaaaacaaaaaaaataaatagaagcagtcattaatagtctcccaaccaaaaaaggcccaggaccagatgggtttagtgcagagatctatcagaccttcaaagaagatctaattccagtttttcacaaacaattccacaaaatagaagtagagggaactctacccaactcattctatgaagccacaattactctgatacctaaaccacagaaagacccaacaaagatagagtacttcagaccaatttcccttatgaatatcaatgcaaaaatactcaataaaattctcgctaaccgaatccaagaacacatcaaacaatcatccatcctgaccaagtaggtttcatttcagggatgcagggatggtttaatataaggaaattcctccattgtttccagcttctggctatcacaaataaggctactatgaacttggtggaccacatgccactgtggcatggtgaggcatcttttgggtatattaccaagagtagtattgctggatcttgaggtagatttatttccaattttctgagtgcttttatcagcttgcaatcccaccagcaatggaggagtgttactctttctccacatcaacaccaacatgtgttgtcacctgaggctttgatcttagccattctgattggtgtaaggtagaatatcagggtcattttgatttgcatttctctgatcactaaggactttgtacatttctttaagtgcttcttagccatgtgagattcctatgttgtgaattctcagtttaattgtatactctattttttattgagttgtttgattttatggtggttagcttcttaagttctttttttatattttggatattagccctctattggatgtggggttaataaagattttttaccaatctgtaggttgctgatttgtcctattgactatgtcctttgccttacaggagctttccagtttcacgaggtttcatttattaattctttatcttaagagcatgagccactgcagttctgttgaggaaatttccccctgtgccattgagttcaaggctctttcctactttctcttctattagatttaatgtatcaggttttatgttgagttccttgatccagttgaacttcagctttgtgcaaggtgacaaatatggatctattttcatttttctacatagagacagccagttagaccagcaccatttattgaagatgctttctttttttcaattgtatatgtttggcttgtttgtcaaagatcaagtgtctgtaagtgtagttttatttcagggtcttcaatttcattccattgatcaatgtgtctgtctctgtaccaataccatgaagtttttaatcactattgctttgtagtaaagcttgaggtgagggaagatgatttcctcagcctttcttttattgttaagaattttttttactattgtggattttttgcttttccagatgaatttgataattgctttttccatgtctttgaagagttgtgatgggattttgatggggattgcattaaatttgtagattgcctttggtaggatggccatttttaccatgtcaattctgccaacccatgagcatggaagaactgtccattttctgaaatcttctatttatgtcttgagagacttgaatttattgtcatgcaggtgtttcacttgtttgattagagttagcccaaaatattttacattatttgtggctactctgtagggagttgtttctctaatttttttctcagcttgtttatcatttggataaaggaaggctacagatttatttgagttaattttatatctggccactttctgaagttgtttatcagctagagaagttctctggtgaaaattttggatcacttatttatactatcatatcatctgcatatagtgatacctttaatacttctttgccaatttgtatcccccttgaactcttcttgttgtcttattgttgtagctagcacatcaaatactatagtgaatggggagagtgggtatccttgtcttatccctgatttcagtgggattacttcaaatatgcctccatttaactagatattggctttaggcttgcagtaaattgcttttattatgtttaggtacggtacttgaattcctgatctctccagtacttttaacataaaagggtgttatatttttctcaaatgatttttctgcatctaaggagatgatcatgtgattttttttcctttaagtttgtttatatagtgaattagggattttcgtatattgaaccaaccttgcatcccttggatgaagcctacttgaccatggtgactgatggttttgttgtgttcttggattcagtttgaaagaattttattgtgcattttgcataaatatttatgaggaagattggtctgaagttcttggtgggtctttgtatcatttaggtatcagagtaattatggcttcatagaattagttaggtagtgttccttctgtctttattttatggaatagttttagaaatattggtatcagatatgagaagagaggttagttaatttaacagaatctaatttttaaagtgtctaagaaattgaagtttgttatatgatgtgaaagtagtttacagaccatgagtatatgaagtaatatactgagatatgaagtaagatacatacaacacaattttattaataaatttgtgcatgagtatacgggtatatatgtttcaatgtgtatatacatgtgtatgtgtgagagtgtgaagtgtgtgtgtgtgtgtgtattaaatatgtaaaattcagacaaaaatcttgagtgctcatcatcactctcaaccttgtttaagacaaggtttcttgttctctactgcatatattggactagccttccagaaattctatcactatgtatcatttctctctacgagtgctggaattgcaagcatgtgtgctaccatttctgggtctataagtgttatgaggatcataactcaagtactcatgtttgatcagcaagtattttattctgagaattatgtctctatttccctacaaagaagtggatttttaaaactaatgttatttatttacttaacatatctatcacagcttcagctctctcctcttctcacagtcccctttgttcacctcccatcccctgtcaatcacaactccaccccttatttctattcttcagaaaagcgaggcctctcatggatatcaaacagtactgttatatcaagttgcaataagactaggcacatcttcatctatttagggaagagaaagccgcccagttagaagaaaggaatccaaatgcaggtagtgtagtcagagacagctccagttccagttccagttttaggaatcccacatgaatatccagctgcaaagctgtacatatgtgcagagagcctaagtccacctcttgcatgctctctggttggcagttcagcctcaattggcccaggttagtggattctgttggttttcttgtgctgttttaaaaccccctttcacctcaaatcctcaaatactcctttttctcttccatggaattcccaatactctacttaaagtttgtccatgggtcattgcatcaatttccataagttactgggtgaaggtactctgatgacaattatgctaggcacctgtctacaggtattgcagaatatcattaatagtctcatcagtagtctccctctcatggcatcagtctcaggctagggcagttattaattgcccttccctcaaattctgctccattttttttaactctggacaacttgtaggcctgaaaaattgtgtgtctaagttttgtggccaggttggtatctcaattccactatcagaattctggatccctatccccatatgtttacgtcttatctaatgtcattttcataaatttctgagaattcccattgtccgaggtttctagctccaatatatttattactatatgcaaccattcagccacttattaagcagttttaatacatttcaaatttattgaaattttactctactttaaaactaaaaatcatttttacatgtatgttgtatagcaaaagtgaaatctcaaaattttctttctccctaccaaattgccacctcaaatatatcttaatatagaaaatcttatacaagtattccacattctatatcatttactctactagcgattgaaatttaaatatgcagggccactttaccacaagaaaagaagatactgggtacacaagactttaaaacattaattatcaagcctgcaatcccaccaacaatggaggagtgttcctctttctccacatccacgccagcatctgctgtcacctgaattttggatcttagccattctgactggtgtgaggtggaatctcagggttgttttgatttgcatttccctgatgattaaggatgttgaacatttttttcaggtgcttcactgccattcagtattcctcaggtgagaattctttgttcagttctgagccccatttttttaatggggttatttgattttctgaagtccaccttcttgagttctttatatatgttggatattagtcccctatctgatttaggataggtaaagatcctttcccaatctgttgttggtctttttgtcttattgactgtgtcttttgccttgcagaaactttggagtttcattaggtcccatttgtcaattctcgatcttacagcacaagccattgctgttctgttcaggaatttttcccctgtgcccatatcttcaaggcttttccccactttcccctctataagtttcagtgtctctggttttatgtgaagttccttgatccacttagatttgaccttagtacaaggagataagtatggatcgatgcgcattcttctacatgataacaaccagttgtgccagcaccaattgttgaaaatgctgtctttcttccactggatggttttagctcccttgtcgaagatcaagtgaccataggtgtgtgggttcatttctgggtcttcaattctattccattggtctacttgtctgtctctatactagtaccatgcagtttttatcacaattgctctgtagtaaagctttaggtcaggcatggtgattccaccagaggttcttttatccttgagaagactatttgctatcctaggttttttgttattccagatgaatttgcaaattgctccttctaattcgttgaagaattgacttggaattttgatggggattgcattgaatctgtagattgtttttggcaagatagccatttttacaatgttgatcctgccaatccatgagcatgggagatctttccatcttctgagaacttctttaatttctttcttcagagatttgaagtttttatcatatagatctttcacttccttagttagagtcacgccaagatattttatattatttgtgactattgagaagggtgttgtttccctaatttctttctcagcctgtttattctttgtatagagaaaggccattgacttgtttgagtttattttatatccagctacttcaccgaagctgattataaggtttaggagttctctggtagaatttttagggtcacttatatatactatcatatcatctgcaaaaagtgatattttgacttcctcttttccaatttgtatccccttgatctccttttgttgtcgaattgctctggctaatacttcaagtactatgttgaaaaggtagggagaaagtgggcagccttgtctagtccctgattttagtgggattgcttccagcttctctccatttactttgatgttggctactggtttgctgtagattgcttttatcatgtttaggtatgggccttgaattcctgatctttccaacacttttatcatgaatgggtgttggatcttgtcaaatgctttttctgcaactaaggagatgatcatgtggtttttgtctttgagtttgtttatataatggattacattgatggattttcgtatacaaccactctggaaatcagtctggcggttcctcaggaaattggacatagtactaccggaggatccagcaatacctcttctgggcatatatccagaagatgcccaactggtaagaaggacacatgctccactatgttcatagcagccttatttataatagccagaagctggaaagaacccagatgcccctcaacagaggaatggatacagaaaatatggtatatctacacaatggagtactactcagctattaaaaaaatgaatttatgaaattcctagccaaatggatggacctggagggcatcatcctgagtgaggtaacacattcacaaaggaactcacacaatatgtactcactgataagtggatattagcccaaaacctaggatacccaagatataagatacaaattcctaaacacacgaaactcaagaaaaatgaagactgaagtgtggacactatgcccctctttagaagtgggaacaaaacacccttggaaggagttacagagacaaagtttggagctgagatgaaaggatggaccatgtagagactgccatatccagtgatccaccccataatcagcatccaaacgctgacaccattgcatacactagcaagattttatcgaaaggacccagatgtagctgtctcttgtgagactatgccggggcctagtaaacacagaagtggatgctcacagtcagctaatggatggatcacagggctcccaatggaggagctagagaaagtagccaaggagctaaagggatctgcaaccctataggcggaacaacattatgatctaaccagtaccccggagctcttgactctagctgcatatgtatcaatagatggcctagtcggccatcactagaaagagaggccctttggacttgcaaactttatatgccccagtacagggaaacgccagggccaaaaagtgggagtgggtggttaggggattgggggtgggtgggtatgggggacttttggtatagcattggaaatgtaaatgagctaaatacctaataaaaaattggaaaaaaaacattaattatcattattttttatcattagtttctgaaaagcatgcctagaaatggagtatgttggcatgtgttcacatgcttatgaatgttctaataagacttcaatcaatttttatatttttgtgcccaagttgtactatatgttgaatgtttattatatattttatgatcctctggaagcctagacaagtatcacaatatttatatccacttctttaaaatctgtccactggattaaaaaaaagagagttatatctttcataggtgtacagtttctagttgtgttagcattgcagtttctattatagtagccaccatcttcaagtgaacataaaacccttgaaatgtactttagcaaagtgagatggaaatgtcttagaagtatgtatttatttatcatgtgtttacatggtatgattctgggtatgtggcttaaaacttaacactgttcaggattgcttttaaagtaactcctcagaaggttagcacacaaataaaaaactatatatacaaatagtaaaggtctaaagatgtaaaatcttaagtatcttgtgagggtcaagttgaaaaggtctaagaaagcaatttaaggtacaagaatatgagaaatgtttcagatttcttttcttctctatgctattattatattaggatatcaaaagttcagagtcttactattaatcagtggaatttacataaaatattaatctggcccttgtaaagcactgactactattagagtctcaagctcaaaatttaaattttctttggtaaccttccaagtatagatttaaaagtgcttcggatagacctctggacagaggaaagaaagagtgttaatgcttttgacacaaagtcatttttgggatccccaaacttgctatgactcaaaaatatcttcctcagcatttttgcagacacttggtaacttcttattctacaatgaggattttaatgcaaatgacagacagtattaatgctaataaatataaaacttttatgaatgtgaacctaaaaaaatacatcatgtaagcttcatagatttttagagtcctattatagaccaggatatacctatcacaagacaaatggactcccccaatacacatataggagaggactgcagggtctatgttcattcagagatgatgcacataaatctccagagactggaggccccagggagtttagaagtcaggtggggtggggggtggggacatttatatggagacagtaagattagtagaaggtatgggatatggagcaatcaggggatggacaggagggaataaaatgaggaatgtacaaacaaacatacaaacaaacaaacaaacaagaacaaaacaacccaaaaacctcctgtcaatcaatagcttaaggtctctgtcctactgcatgtccctaatggtgggttcacactttctgtggttttggaactcctcctgtccacacaactaccagtactatgggtctacgagtttaaagtatacattgaaaatacagatttttttttccctaagctcctaaactttatcttttgtccctgtatctgtttcagaaattttccaatcaactatacggcttgaaaattgcctgtaatgggcaggggccaattggtcttcagaatcagctttctagactgctccaaagtggtttgcactcccattaccccttgttgatcaagcagaatctgaaagctcaccaagcaaaagtccctagcctgcattctcttgcttcccagcctttcccaacattcttgtctttctgaactctgacaatgatataccaatttcagctaaggatcagttacaaaagagatttttgttgtccttatagtcaacaaaaaggctagaatgtcagctcccctaaaagtcaggaaaatcaggttaactctagtgcctatcaccataccatgttgcatgctggcaaccaagttgtctcagtattacaaatacctgttacagagtccatgttgttatcttagctcctctcaattcttcttagtatgccctctgatctaacttcttcagctcttctcgtagcttctcgtttctgcataaccctgcaatttcagctatgtactttcttggtctgcttgtcctttctttctcttagttctctcttgcttcctcattaaattctattctgctggtcatgttaaatctagtactttcactctcttttctagactattccagatgtccctggctacactcattctaatttctattgtaaaatcatttaccttttccattaaaaaataaatcaaataactaaacattatgaagccacatctcttaataatagatcatcaaatacctttacaattaaaaaaaatagacacaaatacttaaagtaacttacaacagtcttttccactcaatttagaaaacataattttctagtataaaaggctattttattcctatgaaaaaacaaactacaaaaaaacttaacacatagctactacacaagtctgttaatataccaagaaaaaattaactagtttgaaattttagattattgaaaactcccagttcaattataagtataatttacaatgtaacacatatgatgaataggacacaagatttttctttcatgattttgtgcaaatatttttccttctctttttaattaggtattttcttcatttacatttccaatgctatcccaaaagcccccccgtgctctccccccactctcccccctcnnnnnnnnnnnnnnnnnnnntctccccccactctcccccctccactcccacttcttggcccttgcattcccctctactgaggcatataaagattgcaagaccaatgggcctctctttccactgatggtctactaggccatcttctgatacatatgcagctagagacaggagctccagggggtactggttagttcatattgttgttccacctataaggttgaagatcactttagctccttgagtacttaatctagctcctctattggggggtcctgtgatccatccaatagcttgctgtgagcatccacttctgtgtttgctaggcccaagaatagcctcataagagacagctatatcagggtcctttcagcaaaatcttgctagtgtatgaaatggtgtcacagtttggaggctgattacgggatggatccctgggtatggcagtctctagatggtccatcctttcgtctcagctccaaacttttaaacttctttcatgggtgttttgttcccaattctaagaaggggcaaagtgtccacactttggtcttcattcttcttgagtttcatgcgtttagcaaattgtatcttatatcttgggtatcctaagtttctgcgctaatatccacttatcagtgagtacatatcatttgagttcttttgtgattgggttacctcactcaggatgatatcctccagacacatccatctgtccaagaatttcataaattcattctttttaatagctgagtagtactccattgtgtaaatgtaccacattttctgtatccaatcctctgttgaggggcatctggtttctttccagcttctggctattataaataaggctgctatgaacatagtggagcatgtgtccttcttactggctggaacttcttcaggatatatgcccaggagaggtattgtgggatcctctggtagtcctatgtccaattttctgaggaactaccagactgatttccagagtggttgtacaagcttgcaatcccaccaacaatggaggagtgttgctgtttctccacatcctcgccagcatctgctgtcacctgaatgtttgatcttagccattctgactggtgtgagatggaatctcagggtagttttgatttgcatttccctgatgattaaggatgttgaacatttttttcaggtgcttctcagccatttgttattcctcaggtgagaattctttatttaggtctgagccccattttttaatggggttatttgatttttctggagtccaccttcttgagttctttatatatattggatattagtcccctatctgatttaggataggtaaagatccttttccaatctgttggtggtgtttttttcttattgacggtgtcttttgccttacagaagctctgcagtgaaatctatattcttgtcccatagccacccatcactaagtacatggactcttatgtatgtttcctgcttaaatttaatttataaaaatattaaacctgttagtaagatatatgtaaaaatttaaaatatatattttaaaattaagtaggataagattacatatcttattttatacaacatttaaaagtcaataatggcttcaatgtcgtcaaatcaatacccctcaagaactatgaaaggttgtactgataattgagtagtattctgtaaggatggtagtgtgaaactcagaaatgtgtgtattttttacacaaaagtaatccactattgtcctaaaatctctaatgtcatgaagggtacagacgctcccaatcctgccctactattcctcagctatgcattgtgatctcctagtccaagataatagacaaaaacctagattttatgactaagaagaaagtgagacaatatatgaaaatagataattaaaataaatgtgtcctttcaatcccctaaaacaatttcactccctcagaccacagttcaaccatgtagacatttttcattatataggcaagctagaacatgggctgtccatttgattgttatagacctatttattttttaaaattcattttctacctagtatgaaaaacatctttgagggtttaaggatataatataactacagagtgtaggccatatatgtattaggctgtgagtttaattcccagcatcagataaactggacatgacattacatagctgtaattctatcactcaggaaatacaggcaggaggattagaacttcagcgtcatcatacttgaggccacacagagatacatataatcatgtaaaaaataaataactaaatatagaaatataaaaaataaacactctgatgtacattgatgttggtaataagaaatgtgtgaaaataaatattaacatagttagtgatccatagatttactcttaaatgtgtgtgttcaacaggaatctgtagattttctagtcactatctataaaaaggctaagcactgtgtatgggcatttagattagtagtattagctatcagattcttacacatctaatatctaaaaagtcaagaaaaaagaaaactaaaaattgtcatttcaggaaaatacaaaaacaaaaatgtgaaacacctgaattagtcatagactaattctagtgattaaatatgctgggctgagatagatctgccactaatatttgagactaagtgcagattgccaaatgatgcttgtttgaggtgttgttcactgtgttttcttttcagataatataaatctttcagttttcagggtatttgttataccttttgttgagaattgaaagaccagagtatatatatgtttaggatcaggagttgaaggtttaatattggtttgataaaacactttctctggatattgttaatgatcatatcacttggttccctgcccatgtgcaagtaaccacaccccccaccaaaaaaaaaaaaacttgtcaaaaggtattaagccaagttggtcaggctaattacaaaaatcatgcaaggtctttacaaaactgagtgagtatggcctaaagaacagaataaacagagatatgatactgtcatatgttaataatctcttaggcaaggagaaattgtattctttgtcaaggatgtgaactataggaacattctaagaaaatttcattactatatgatatttaaagaaacagtggttttaaaaattatttgatagaaatataatagaaagttattttcatttcagtatcatgataatctatacataattttacttgataaaaatagatttacaatctttgagatttgtttgcatatgtatttaataatttctgccatattgatttattatatttttatgcaagaccaaacctagtgaatgtatgacattatatatatttaaggattggaaggatcccatagatacttaataaatctaatcaggagcccctgagatgatacagcaaataaaggtgcttgttggaaaaaaaagaaagaaagaaagaaagaaagaaagaaagaaagaaagaaagaaagagagaaagagaaaacaggaaaaaagaaagaaaaagagaaagcaagagaaactgaacaaataccttttctgataactgtagctagctcaattcaaaaaaaacaaaaaaaacaaaaaaaacctctccccctagtaacatagtatttcttcactagttttcaaagttgttaaagggacaagttctccagcatggtagattaaagcaggcaaaatcctgagctccttttagtcatgatttctatgtttctatgattctatgaagtcatagagaagattggacaggtattgattcacaagaacccagagagtcacgaagcagctacagaaacatatcaagctgtcttgcaagctgccacagaagatttatgctgctcccttaagagcagccaaaaaatgaggagtcttccatctctattttctagtcgcccttttgatcatctactggaagtcctgactcaggtttagcaagttgtcgttagacaaaaggtctttatgaactgtattttgttgttccgaaaagttatttatcggtagtagatttatttttagtaactattgcattattaatgatgtttaatgtgaattttgatgggcatcatgaggactcactcaattgtatttatatccaattcaggctactataaatatattttgtgtttccactttattaaatgttcacatgagcaaagtctcagtttcagttatgatttttcttcaaatttaggtatgttgattgatttatttagtgaaaatgattattccatttcaaatctcattacttttcagcaatatgtgggcatttaaaaactataattgtatccaagggtataaggacatatcttaccattccttaaatattagtcatgacattacatacctaccatgtgagatattgaattttcattgaagacaaaaattgctaaaacagagtcaaaactagaaagaagtgagagtcttgtggttcaatagctactttcatgatatggaagactttgatattagagagatcacatagagaaaaattcaactagactagctacagtagaaatagatgagatattgattcctgaactgtaggaggatgtgataagtataacgtatattttctgaacttcatttccagcatctctgtttgcttgtttgtttattttgttttttttttttttgttttttgttttttatttgtttcatcttttgttattcctcattatccattcctcaggcttatccaagttttctgtacattaaaggccttaaaatgtttaggtccttcaggaaaaaataaaggaaaattgtacttatgaaacccaaagtgtaaatatgtgcacaagcgaatactattcaactagtattagtatcaaaagcattctctgtcttttacaacaatgtaaattaagctgaaatacattgtgttaagtgatataacccagacacataaaaatagatgttataacacatgcaattacttacatgtggaatataaaaataataaacccctggtcaaagaatgtagaactgtgactataaaggtgggaataggagtgatggagactgggaagctgttagtcagtcagttagtaaaatttttagttagataagaaaaatgtgcttaaatgctttgtgtttcatggaaattatagttaataacaataagctatatttctttatgttcctaaaagtgttggttgattaaatatttgtgtgtgtgtctgtgtgtgtgtgtgtgtgtgtgtgtgtgtgtgtgtgtgtgtgtgtatgtatgtatgtatgttcatttgttcagttctgtgttcctgtagaatgcatgtggagaccagaggaaaagcttaagtgttagtccttacctcatgtataacaattttgtctagatatttttgaataggccaacaggcttagcactaaagcttttggaggactgttttgctccacctccaatctttctcagaagctctgttatcacttctcactttatacggcttttgagaatatgaactagacttctcatactggtgtggctcatgcttcatttactgagctacctgtggaacttaagtgttcttactacaaaaggaaatgtggacttagtacagagtgtgtataaaattttgtggcataattgtaagacattgctgtccttattatctgggtgtagatattccaaaatatataccaaaatagcttgctgtatcaaaaaagacatgccatttaattttttaattaagaggttataatatttaaaataatgcattataattaggtgggaaatcatgaatgtatttcaagtgataaagccaagcaatcatcggaagattctataatgtgattcttcaccttaaattaggttagggcagcatgtcaaagagacacacaaagaactactcttaggctatatcctaaatatatttccccaccttgaacactacagttctaggttagttctaactctgtcttggtctagagcaataaagtttcaatacatatgccataaacatacctagttagagaagcaaatttaaaagtaatataaataaaaccttctgctttttctatgctgtagatctgaaagataacacaatttttttatgtaaaaactgtaagtccttgagccaagtgaagcagtcaatggcttcaacattttgggttttaattttgaccctgctggcaattatcttctcatgctggtgcttgtggatctctattggacttatcgtgtccaaaacatatgtgattgtacaagccctttagcaacaaacaaacaaacaacaacagaaaaaatttataaatagcagatattacctttatacttctccttctcatcctcattgttagtattttttttttaaccacagacttgataactatataaaagtgcacaggatttaaacattttaacaatacacacatacattatctagaagtccctcaactagtagagtgccttagatcatcacatatgctgtcaccgttcttccagcaggacttttgtacatatggaagcctctaaccatttcttcttcatatccatactgtggcaacttgtccttgccatactggctgttgaatattttgaaaatctttcatcagtaaagaataagcttctacaggtacatttctttaacaatctgtggctcaattgaaaagaatggtacttctttcagatttcaatggttacaaaaataagtaaagaaaactagtagaaatgaactgtttctctgcaaaatccacatgacttttaggataaggaattcctatcagaattactctaatgttctatcatgaaattggagactgaaatttaaagtaaaaaaagtttggatgaccacatagatattcctagaagagaacaatactgttcctttttctttggggggaaggggaggaatcaccaatgagatttgagttttttctagaattcagagcaaacagaccaacagaagtctgtgtggttagagtgagaatatgctgagattatgctttatggataaaaattgataagtgagattaggaaggagaaacccattgacttacatttttagcagttatgattcacaagcatatacttaatgcacaaaatctgcgaacaaccatagtatagtcactaatgccaattgttaatttgacagaatctagattcccccaggaaacatgcctttgggtatggctgataaatggtatcttggtcagcaaagttgagttgggccactgtgcaaaaagcatcactccttgactgggatccttaattaaatgaatagagggatttgagccacttcatacattcatcactttctggatcaggccatggatgcagatgtgaagagtagtgtcattcttctgctacatggtccaatgttatatcttgttactataatatcaaccgtgttatgcttgatccccatccattacaatagacttaactagaatataagtatttttaaggttgagaatcagtaactgtgcctattcaggtgtagatggaatatctatagcactcctgcctcagagtgcagggaacatcacaggatgtaagacctagaggatagtgaggggtactttgaaaagttgccctccagatatgacatgattattataaacataagctcacagaagctatggttaactgcataagatctccataagaccaaaaaaaaaaaaatccagcatagagtacagaagggttctggatccctcacccatagctaaggagtgaagaagagaaaactgtttggtgtcagggggatacttggtatgccgttcacaccttaatggattatatcacacatttatcaatgaataatctaattggattcagtggcttatctaaaaacaacatggtcagaagacaaatgagagatgacggcatgtagggatagaatgtgaaataaatatacccaagatacactatacacacatataataatatcaaaactatgttaggaaaacacatacatgttggttttatacacgcatatgtgtggataaatagatgatagattgatgatggatagatggatggatagatagatgatagatagatagatagatagatagatagatagatagatagatagatagacagatgatagatatagagagatagataggtagatagatagatagatagatagatagatagatagatagatagatagatagacagacagacagacagacagacagacagacagacagacagacagacagacagacagatagatagatagatagatagatgatagatatctcaggtgattgtctctgagcatctaagagctagtgaagtgatcagtgtacaaatagacttgttcccaaagcctgaccatctgaatttgactcctgaaatacagatgagacagaactgactcctgcaaggtgttctcaaatttccatgtgtgcaccatggtagcaggatagccaatcagaatttggaatagtaggtctcagtttattttaaagtcatcaggaagagaacacaatcaaaatagaattctagaaacgttattgaagaagggtgatataaaagcaagtaaacaggaagaaatagaagcctatgaggttgtaagcccaggaaaatgggttaaaatccaaaaacattcttgaaattctttgttgaaaaccacaaggtaaaattatctctcctgtcttttattttttataaaaatacatgttaaatatttttgctttactaaaggcaaagccaactcaaatttctatcaagtgtttctgtaccaagttcattcattatgacttagggcaggcataatgcatttcacgaatcctgtatgggaatgcagtttaagtaaagaagagaatggctccattcattagtttcctcattcactgtttgttcaggcatccattctttcattcactcattgtttacagtaatgtaataggtcagtttatgggaacactgccaagaccttggcttgacctcatttgaaaagagggcaacacagaatgaaaagcctatacaggatttatatttacctttgaaaacatacacacatatgctcttaaataaggctatgaaggttacagcaccaaaccaagtatcaaagtgaggtgcatgctcttgtaagttgcagttgatattctctgtgtcccttttccatgaagatgttaaaaaaaaagctcccaaatcaattcacccagccatgcctctctatataatctttccacagcactttggctttgggataaatataaattagaagtgaatgctgtgagaaagatctctctagctagtccattgggtcattattttttaaacataaataaaatcgaactgtaatttatagctggaagttctctgaggtttacatcctcttcttcttacctatattttcttctctcattataaattaatgacagtgagcaacagagctttgctggggattggtgtaaaaaaatgtcagtagaaattaagagtctttgtctagaaggatttgaaataaaagaaaagttctgcatatgagtttgttagaaggcaccacatcatagcctcttcacttgctattcatttatgggtcatttaaaatatatcttttcttccatttccaaaatttcatactaatatgaaataccttactaatatgtggatactaatatgtggataccttagtttagatataagcaaaaatacttacagctctgctttaaaagtttacctttgaagctagaacaaatataatgtgtgatttactatttgtggaaaaaaagaggcaggtatatcaatcttgggtataacatatatttatatctacaaaggaactgagttatcacataggtcctcagtcacaccttcacatcttttaaaaataattccatttttaacctcaaaaattccaattaaccttccatctttccctctctcccttccttccttccttcctcccttcccctcccttctagtgagttatttaaatatagtagtagctgtcagaatgtacagttcattctgaggattaggaggagttcagggattggtttcctggttactctgcaccaaagtgcaaccaagaaattcacaaagccacactcttctttgagtttattcctatctatcctggttattgaaatataatgggaaccatatttctaactggccatcagccagtgatcaccctggacttctatatggtactgagcttctatgctaccagacttctctggactccttgctggcatttgactagactttttaataatatggtagcttgccttctcacttctagtgagagaatttattggtcttgtttaataatgtatagtaatatttaatagaggacagcttctatggagaaactgtctttttccttagatgggatctagtagttaattgcaagttatagatgcatatacacgttgtgtatatacatatgatccactcaagtaaagtggatcatacatgaatttgactcccactaggtcagttgatcactttaatttatgagtctactcaatgggacatagttttatcatattgaatattttttctttgactgagaacaaagttcagtgttactacacttgccaacattgttcaaagttccaagtacaattcccatccctggaaagtaaaaaaaaacaaacaaacaaaaatacaaaaagaaatcagtcattgtgctgaaatggtattttaatcaagctactaatagtatttcaaaagaaccaattatatgcatttatcaagatcctgttattgtttggataaagatatctgtatagtaataccatataatcaatttatgtgtaccctctggctctaacatacagaggtaatttggaaaatccctaacttctcttaacagagtaaatgcatttgaaatgaaaataccctcacgattgtgatggttaatattgattatcaatttgactggatataagagcacatgagaaataagctattttcacatatgtgcatctttgaggaagattatagttcagttacctgagataaaaaaattacatcttcaatggaattatttaaggaatcattccttggacagaggtctggattataaaggagagaaaacagggtgaacatcatcagtattatccctctcttctcttctgattgtcaactccatgtgccctcctcgagtccttattagcttagattcccttccatgatccctttattagtttgcatttatctgctctattgtctaattaatgtgaaaagtaactcaaacgtaactctttgtcacacaaagagcatttgatcttctatgttccctttattcagttaaataatacacttatttttgaaaattcttcatctaattttgtaattctattgaaaatatggaggtcgtgtgagaaaatgttcataaatttttgtaacaaggaatgaaatgaaatacagaatcacttagccacagcagttgctacttaccaggcatttcactctctagtcaaccactacatgaaagtattaagtggaaagccagaaatatttaattcacacagcttaaagttcacaacattctgtatattatgatgaaatctcagattactgtatttttttcttcactgaatcttaattaatccctttgttctatccatactaacataaccagagtatgtgtattacccactagagaatagcctttttcatcctgagatctatattttgctcaagtaattagttgaaagagaacctgtgctcatataacttttattacagtttgttgttataaatttcctgtttgatgattattttattagcctattcttttcttttttaatttaatcttttgtatatatatatatatataaacataatattccagattttattcccctcccagcctaccctccaactattccacatcccatacctcatctccacccttgtctccaggaggatgttcccaccacccaccatctaccccaccagacctctaaacatgctgtatcagttggtgtatgctacctggctgttgggccagtttctgagagatcttaggggtccaggttaattgagacttctggccctcctacagggtggccctcctcttcagcttcttccagctttttcctaattcaaccacagggttcagcagcttctgtccattggttgggtgtaaatatctacatctgtctctttcagctgcttgttgggtcttttggagtgaggtcacaataggttcatttttgtgagcactccatagcctcagtaatagtgtcaggccttgggatctccccttgagttggattccacttcaggcccatctctagaccttcttttcctcagacttctcttcatttccatccctgtaattctttcagacaggaacaattatgaatcagagttgtgactgtaggattgcaatcccctccctcactcaactaccctgtctttctgttggaggtgggctctataagttccctctttctattgtcaggtccctccctttgagtactgagaatctctcacatcccaggactctggttcattctggagggtccccccaacctcgtacctcccaacgttgcctatttccattctttatgctggtcctcagggcttcaatccttttccctcacccaataacagttctgattctcttcttaatccctcccgggtccctccttcccttccccttgtgattgctttctttcaaattaagctatcctaagtataaatttatatagagattgtggtaaaggggcttgtgaccagcctgggttgcagccatacctttgggatttcagatgtctcagaggaattgggcatctagcaggcaggagtgacaagtgtatctttctctgtgactcctttttctagtccagtcactataaaatatatcaagatttaagttgtaggtgctttttggatgaatgacttggttcctacaatttaattttttgagaattccttaagtggatactgaagttataccctctttctcccctttcctacccctcgtgtgtctgtcttacttatcaaacacatgattctttattatttaatgatgaatgtcagagctataattaagtacatatttatatataacactgtagtatgttttatatagtaaaaatctacacacttgagagatcagttagtgttgtatacatgactttaggctgacctcttagaattgggtaacttataagcaagcccatcccagcagaagaaataattctctatctctctgcaaccatcagttgcctgtagtttaatttgtggggggcgggggaaaacacctagttcaactccccccaagaataaatggaaaaagaacaaaagaaatatcaccattcttcatatatttcttgaatatatatttcactatattattttacttacaaaatattcctgagtgcctagtttttaatttttttaaccaatacacaaaacataagccctgtacacattcactggatatcagtgtttaatacatctctatagtatataagcaatggttagacaagattaaatgcatttatctccaacattagtcacttccttatggtaaaaattttcatctttgttcttgctgtttaaaatatctggtgtattattgttttccctctcttcatattggttgattgtttttgagctacttaaaactttgcgtgaatactttcatttgccaagcatcttgcaaagttaagggcaagtatgtgcaacacatagactggtaatctgtggactcacctagaaaatgttggttttttaaaaatcattcctttatttgatgatgtttaaatggaagtaactaaaatatgttttttttcttattgctataaaaattcttcttattgctggggatttggatttagggctttgtatttcaagaagacagcagagtggacacatagaaaggttcatatgtaatctcagaggattgttcattcaaatgttcgatgccagacagtttactatttcttacttagtgacattgaaaatatttattgttaaatgaaaagttacagtagcatcagcagatcactatggcctgtcagatataatactctgtttctcattaggcatttatttaatactaataacttagagtttagctaaatgacttattatcattctataaaatgtattaattaatgtttgagactccttactcaaggtgagaaagctagtcctggaaacatagttgtaacagaactgagtatagtgtaatatcttaagatcttcatgttgaacaagaagcctaaagctcacatgtggcgtagtttgtatgcttattggtatttttctaagaaaataaaacttgaattcctaccactaataacaaaactgtatttaaacttgatatttttgttttctcaaaatattatgaattaggatgtggatgaaatggaagcacggcatagagtagcatcagttcctattttgaaatcaatacactagcacattttttattgagttatacaagttacaaatgtttattatacttcagaatgatgatgccagatagaatactgtcattataaatatgataattctgttcttgattgtatgcttatgtcaaaagtccaattgagatgggaatgcttataacgcagatgtaataaaaaaatccctttattcacttatggccagtaaaacaatattagaagatgatatattccagactcctactggttagtgacttgggtctcattattctctattatatttattgtttgttgagatataatttccagacatcttatcttcaccattaatatctctgcaatggcctatattataaattatgtatccaaatccaagtagtaaagatatagatttatgaaaataataataatagtaagtgggcataaggcaactatcagatagaaaagggacaagacaaaacatactagggattctagtacttattgatagtaggagttgggtcttgtgtgagtgccactgtaccctggaccctcagagtcaggaggaattgcttctctaaatagatatatatgatctcaacataaatttatatttattacagagaataaagtagatggacatcaattgattttgtatttcaaatttttcttttctaggatataataaacctaatgaatgaacaggaaagtgaattaatagcacatacctcgatatgtgtttaggagcaaaatatctacctggggatagacttgattcttcccttagattgtaaccctaagacacacatgccttttataggaaggagatgagaagtgttacagttttgaatcagtgctcacaaacactaggataaaattcataatgaagatctttgaactcagagtcggctagatagaagtcctcagtgaagaatgttatgaagattcagataaagtctgtctactctggaacaacaattatgccttttctattgtttgcagaactcctacaaagaaaagttagtatctgttatgacatagtttatactacaagatgctttcttttgtttgatacttttcaaaataaagtattgactcttggttcatgtatgcatgaatgtatgcatttgacaaactcaccacatgtacatatgtttgaaagagttgacttcagccctgaatatgctttgttctagttctttgatttaaccagataaaattggtcaaactgctaaataaaagtcttttcatttctcttgaggaaacagtaatctcttgcaattatcttgttctagacaatatgcatttattcacagaaatatttgcacaaggaatagttgtaaaattagtcactgtttcttttatttatttgctttccatcccaatgtcagctcccccaacccagtccaccctcacacagatctttcccccattatctactcaaccttctcctctgagtggggcaggggaaggctctaccccctgtgtcattaaactctcacttattaagtcaccataggactaggagcatcctcttccattgaggctacacaaggcagccctgtcagcagaaatggacccataagcaggtgttaggtatagccctggctctagttgttgtggtacccacatgaaggctgcacttctgctaaatatgatggggcttgtcctagatccagcttaggctcactctttcattgatggttcagtctctgagagcacccaagttgagtttgttggtaatcctgatggaattctcatccctgtcctcttcaggtctgtctatcattccccaagacttccactagactcatgagctccatctaactcttggctgtgcgtctctgcctcttagaggaccatgaggataggctcatgtctccaagcataacagagaaccattaatagtgtcaggaattggttcttgtccatggaatatgtctcaatttaggacagtcatggttggtcgttgcctctgccttgctctacctttgtacctttacatcttgtaggcagacacattttatttcaaaggtttgatggctgggtttctaacctccactgggagatttgcctggctatagaagatggccacttcaggatccatttccccactgctaggagtctcagctagagtcactcccatagacaacctggaccttccctacatcccaaatcttaggcacattacacatcctgcctgcccacacacacacaccgattaaagcactaggcctgtgatgcaatagaaaaagaacatgaagactgatacaatgtctaggttttaatatttgtgagacaagatagaagctgtaatgtcttgttcatattatgcataataaaaagtacattagtttgtttctgtaacttattcaaggtagattccttttaaaatgtgttgtggattacacagtacattatgaaaaatatgtttatatacttattttggaaacagaggggtactacaattgagcctatacaatgaaaacaaatagaggaatatttaaaatgcacaaaggagtcagattatgattaattagaaagttaagtttctttagaatgttcctctgtcattcatattcagactcaaactacaattcaacagtgctccatcaccaggctctgcggggcattccattttcagggagaagcttgacacatttggacttttgtgatatatggactcatttctaacaatgagatcaacaaatagctcatccaaatacctttgactcaggagaaagctaaagacttttaggtaaaaacctgaaatattcttggccatctgcataatgactgaaattagcataggtttacacagtgcacatttcctttagaatttacatgtctttgaaaggaacagaaggctataaatttcctatggggaaaatctcttgagggcctgagggcttgaaaccaaaggagtctaatgtgagaggcctgtactgcatggttgagaggacaaaaatcattcttcgagagattactgtgttatgataacttttgaaaactgttccttctatgaacaaagcaggcttaccctttggggaacactggtaatgaatggcttctccgccctacttattgcaagatgatgtaagctaaaaactcaacattcgaccccataaccagagtttcctcatagaaatgtttccacacagaaagaggcaaaaagtcaggaaagtaaagaagaatgagggacaaatatagagaaaaaaagatgaggaaaagattgtagtagacacaaatggaaaggaaaatatgctatatctttgaattttaaggtttgtacttctgcttaagctggccttactatttctctactagaagactaacctatggacaggtagcttactcttccagaatgcgagccctgcctaagtgtcaggcatacctcaagagaaggaaaaaaatcctactcctatgagacacacaggcagggaaacttctgaacaaagtgcaaaggtatccagtatatctttatctgtagaggtcacaaatcttatgcaataattacatgacaatgtgattgattcccaagcctttcatctccaaagtcctcctactatttcctttcaatcataggaactgtgttcttttgatttctgtatgggtctactatagaatccatggttgtattgatatacgctgtgtgttccaaattttaatcagttaaaactatccttctaattttttgagaaggatagtagaaaacattgttctagcttgggataatttcaatctagccataaaacttttaatatagaattttttgatatctttttactggatattttctttttttctagtagatgttttctttatttacatttcaaatgttatcccctctcctgatttccctttggaaaaacccctttcccctttcccaccccctgctcaccaagggacccactcctgcttcctggccttggtgcattccccaacactggggcatagaaccttcacagggccaagggcctctcctcccattgatgaccgactaggccatcctctgctatatatgcagctggagtcatgggttcttccatatgtattctttggttggaggtttagtccctgggagctctggagtactggctagttcataatgttgttcctcctatgggactgcaaacttctcttcagctccttaggccctttctctagctcctccactggggaccctatgcttagtccaatggttggctgagagcatccacctctgtattagtcaggcactagtagagcctctcaggagacagccatatcaggctcctgtcagcaagcacttgttggcatccacaataatgtctgagttttgtgactgtaagtggaatggttccccaggtgggacagtctctggatactatttccttcagtatctgctccacacattgtctctgtaactccttccatcaatattttgttccccattctaaaaatgaccaaagtgtccacaccttggtctttgttcttcttgagtttcatatggtttgttttctttatttacatttcaaatgttttcccctcctcttcccccaaaataatccctattccattccccatccccctcattctatgaccttgttcacccaccaattaactcctgcctccctgtccccatgccctcatatccccctacactggggcatcgagctttcacaggactaagggactctccattgatgcccaacaaggacatcctctgctacatatgtggctggagtcatagcttcctccatgtgtactctttggttggtgttttggttcctgggacccctgggttgtctggttggttgatattgtactttctatgtggttgcaaaccccttcagctccttcagtcctttctctaaatgtatatttcatatatgaatccaatgtgtcttgatcatgttcccacacattatttctcactcttctcagattctctacatcacactcatgtccacttcatatattttctttcactctgaatcatgatagtcacattctttttaaaatatttaaatatctgcatgtcattgcttgaatatgagaatatttaacacataatattgaggtagaagaaaaaatgtagtcacacataaatcatcagactaggagattgtataaaactatttagggaaataaggctacagagagaatgtatgggcggctctttgcaactttatactctctgctttctcaatgacactgacagacgacacaagtgtgatttattctcctttgttactggtcccagttaaatagatagaggaaacaaattcgcaagcagaatatcgagaaccactgtttcttgctgagctcggttgccatctgtaaattcagatactgtgctatgagacagagttatctccttctaccataaagtggcatgtctttttttctaaacattactttctttaaggctcatttttctcatctaaaaatatggaagaatacccacttcaccaggtgacttttaggattaaaagatagcagacttctatctctgcttatacagatctatttggttttggttcctagatttacttagtaggagattgaagagtgatttcttataggaaagtgtagtatggtttaaatatatttgaattcaggacttcatgtaggaaatgattttgaaaaaaatcaagatttattttagagcccaggatatctgtggaagacacatgacttacagggaagatttgatctagtcctcttgaccttggatttaggaagttcctgtatctatcattcagccctaggtctagcatagtgtctaaaatgaagaagtaccccagaaatgctagcaaagacccccagtaaaaggaggacatgaagtctgaactagccatcttttgtaaccaggacatacaagcagtcctctaaatgactgaattacctctccagcctctggttaactatttcttttttttttaatatttttattacatattttcctcaattacatttccaatactatcccaaaagtcccccataccctcccccccacttccctacccacccattcccatttttttggccctggcgttcccctgcactggggcatataaagtttgcaagtccaatgggcctctctttccagtgatggctgactaggccatcttttgatacatatgcagctagaggcaagagctctgggctactggttagttcataatgttgttccacctatagggttgcagattcctttagctccttgggtactttctctagctcctccattgcgagccctgtgatccatccaatagctgactgtgagcatccacttctgtgtttgctaggccccagcatagtctcacaagagacagctacatctgggtcctttcgataaaatcttgctagtgtatgcaatggtgtcagcatttggaagctgattatggggtggatccctggatatggcagtctctacatggtccatccttttgtctcagctccaaactttgtctctgtaactccttccatgggtgttttgttcccaattctaaggatgggcatagtgtccacacttcagttttcattcttcttgagtttcatgtgtttagcaaattgtatcttatatcttgggtatcctaggttttgggctaatatccacttatcagtgagtacatattgtgtgagttcctttgtgaatgtgttacctcactcaggatgatgccctccaggtccatccatttggctaggaatttcataaattcattctttttaatagctgagtagtactccattgtgtaaatgtaccacattttctgtatccattcttctgctgaggggcatggttagctatttcttaaacaagaaaagacagaagtgttttaattattttgctataatgatctttagaagtgaagaaaggaacaatacaatggttgacagaatctaataaaacagttaatacaagaacattaaaatttaaaaatacaatgattttaatcagcagttttcaacctgtgggtagtgaaccctttgaggattgattaaccctttcacgggagtttccaagtccattgaaaaacacagatgtttatattatgattcacaacagtagcaaccaattaattttatggttggggaactaccacaatatgagtaactttatgaaatgcttgaagcattaggaagtttgagaaccactgatttaagtgaatgtaattttttattgagtttactatataagtcctgtaaatctaaaatgtttgcagaatatttttatggttgaaacagagtaattcagaacctgaaaatgatatggtatctatccaagttagcattgattgtgaatttgagacagcctaaagtcatctgagagtaaattattttgactgaagaattgcctagttgtccaactggtttgactgacatatgggcatatctatgtgcaaccgacttgatttttagattatttaggaaggtccagtctacgttgaggtgttaccatcactattcagttggtaccagacagtataaaaaaatgtctatgaatgagcctgtgagagcaagtcattgagtaatctatcaataatatttcacaaaattcctatttgtagatttctgtcctgagttccatccttgggatgaacagttaaagttaggaactggatgaaagacaccctaagtcacttcttttccgcgatttatcacaacaggaaagtaaccacaatactgttgaagatgaaaattttaatgcattcagttcagatgaaatgtgctttgttttggtttccaaatatgtttaagaattggatagcattccattaaaatagaaagttcttctttaagcttggaaaaatagctggtttcagtgacatagcttgcgcaagcggagagaatagcacaaggtaaatttaagctggctggttatctgtgtagcattttgtcagttccctgcattaaactgaaagagaagggacattcattaccatacctcaaatgtcaagacctttttagattagatcgtatatctcctttacatttgtaaaaaacttgtctcttttagatttttttctgttttatttaattttaatatgactgtgtgatgcttaacctgagtgacctcttcttggtctcaccttctaaggtctatactcaactgaaatctatgatctcccattatttttatttaacagtaatataaatatctattaataaaagatacataattaattatgatataaatttcataggtttttttacttaatatttactaaagttctaatgcaaaagtgctttgtttatcttagatcaaaaactatttttattacttaagtaaagttataatctatgcttctattccttacatgagtaaagaaagagagccatagattttgataactgaaattaaactttatttcttttttctttatttgaatgatgagactaatagagatcccaactttggagagcagggagaacacattcttggaaaagtgtactcaatgacacaatacttagagaaataactgtcatagaatcaggtatggtaacgcttcaatgtcaaatgttcttcagaatataattgtatttcaatttcaaagcacatttaaatgaaatttgatacattgatcaataacttttatggatatcttatctttcattgatctagacagatttttaaatgtattattagtacagatgcaaaatcatgatgacatgtcatatacttattttgatacttctctgtatgattactcttagtgaaaagagcagcaatcaaattgcttctagtgaagtcacaggtaataaaaatgtacccttgactaagctgtaggtctaattatgcactttaattttacttgatataggaattaccgaaggaacgaagaataatgcatgtattttgacacaatggagacatcctgacacctcttctgaatctcagtaaattaactggattcaagcttggcaaacaggaaaactggtacaagacaacttgctacaggtatgtgagagctataatttacactgctaaaatccttcaaagatctattgacggtggggttgttaattacttttcagataattataatgtttctttggtacatctaacagcttctgttccctcccacatatacacatgtggatgtcagcatatggcgagaagtctggccatttcatcttgtttacttgggcctttagtcatctaaaaaaggatgaaacagaaaagtacccacctcataaaacttttactactggagatttatgcagaatgatgcggagtcaaactgttactcaaacagatgtttccacctgctgttctgggagtttaaagggtggtaaacaggcctgccagaattcagaatgaaaagagggacaaatggtgatgtgccacctttctgttgttttgaaaatggggcagcatttggatcattaatatggaacaaagcatttgggaaaggtaactgtctttattttccctttggaggcttgctgattggaaaacttgatgcattgacagtgtgaatgtatcttctgttggattattgggaaagctgttattgcttgaatgaaccaataaggaagaatgaaactgtgagtgacccaacacaaatggctctgtgtgggctaagagcacggttacagcctccatttttgttaaatcttgtactatttagagtcaaagcaagccagccacccagctgtgggaaatgcaagtagtctgcttgcctggctgcagttttcactgggatggaacacaacaaaaagctcatatggcttagacattctgaaccattcatgataagggagaagttggtagttgccattttaactaacaagtacttacttcaattcctgacagtgacagtgcttcaaaacgatgggaagagatgttatttggaaacctaaaaccttgtaggttttgctcaggaagtcttctgtcagtatttatctgtctctaagttgtattatagtgtcaaagaaaattgtttctatgtccttttcaaaatattttatagttgatatgctaaaagaaaatgaatgagttctcttgagataattttgatatcaaacttattcattttatgacctgtaatgtcatttgcttatttggaatagacatctattgtctttctgtattatgttatatttgaatctccctgaatgttactataacaacagtgtttttttgttacctacttagccactactgactcagtgaggaaggagccataagggtctttattgctaggtcatgctgaatcttagggagatgtgtacctttattcatttactttgtaaaatagatttctttcgtacaatatattctcatcagtgtttccctttcctcagttccttctagaatcttcttggttccacaccaactcaactacatgctttctttccttgttagaaaacaaacaataaaaaacaaaacaacaataaaaaaatctaaaatagaacaaatcaaataatagcatgatatttcttttctttctgatttcttttcattattttcatcattttttaaaattaacttctgtctatttgggttgttatattgtgaagatgtgtcatcttaagcaatggtataagggtggttcatatttttctttcatctgcttagaaaagaagaaagcaaggaaatgagtaacatttgaaatgtaaataaagaaaatatctaataaaaaagaaagaaaaccttttttctatgtggtcttctttaatgttactcttgtgtggagtttgaaggacattgctatatgtagcctgctgaagattagaatcttaatttcctattaagggtcttctgtctttataagagttgagttatggtcacattttttgtttcttatgaataattggataaaattatgtgaaagttttctgtctgtatttttaaatggatttagcatttatttatttggctgcttatttttttaatttctgtgtgtatctatgtatgctatgatatgtatagtatgatgaggggtgatctagataagaatttatgggagttggatctctacttatattttgtagacaacagggatttaacttctcaacctttagtgggaaagatttccctattgagccatcatgacaacttggatgtgctctttcttaataaccttccctttccttgtttagtaaaatcaaatatctttttctctctttttgtctggctctgtatttgtctctgtctctgcctgtgtctctgtctctgcttctgtccctctgttgttctgtctttctaacctatgtatgtgagtatgtgtgcatgtgtagcagtgtgtgtgtgtgtgtgtgtgtgtgtgtgtgtgtgtgtgtgtgtgtgtgtgtgtatgtgagtgtgtgtgggtctgtgtgtggaccagggatgagaaataaagaagacacaagcaatactggggtcagaaagtcttgcacaaactggtgacttatgccaaaaagtttattaagaagtatagcattttatatactatttgcatgggggtgagtgaaagggggactgccagtgttggaaaagagaatatgggataccccagaccaagttgtcaagaaggaaaaagaggggaagccgcaaacattactcctccccagaattagatagatattgctaagacacagtggaaacattccatttgtccttttatcagggcctctgagaaactcttggattggtctcactgtgcatgcatgcgtgtgcgtgtgtgtatgtgtgtgtgtgtgtgtgtgtgtgtgtgtgtgtgtgtgtgtgtgtgtgtgtaggatgtcttttagcccaggctacacatctcagacttatctacatagcagagacaggccataactcatgatccttgtgcttacacctgctaatttctagaattacagatgtatcatcatacttaatatgcacatatagcttttattgtcaaatgctcccatcttgttctcaactatcatcaaagagagtactaccatagtctcttgtttcacatttggattgtagcctgtctgtaggtcacatattgatgccagatatccatctcatacaatcctaaatgaaatatatacaatgaaaaaaattttaaagaacactgtgttgaaaagataatgtaggatgattattcattaaggcagcaattaattctacaactaaacatagttcaaagaggaattctaaattttattaacttataaagcccattaggttggggaatcatataaataatggctacagagttacttaaagcaagggctttatctaggaatcgaaaaaacttatgacacaaagaatcagagccagggttctccagtacttcattcctgagccagagaagcatctggcttgaacaaaccagcaagagccctgacggaaagcaacatgaatgtagttgtttggaattctgttgaaacagaaggcaagcctctgtcaatcaccaggaaaacttgccagcagcagaggcagtaggaacattgtgcttgagatcctttctgccctgtgttaggacccctgtggaaatcctccctacaattcataaatcaggatacacttagcgaattttcaaaataagaaatgttcttaggattatacaaggataaagatttctcatttctctttggtttcataataaaagacttactctttgaaagaaaagtttcccagggttaaccccgggctgcaaaataaacaaaaagaatatggttttaagacaggttatgaatactttatgtttatagcaacttcacatttaccaacaatattttagtaaaacaaaaattatgaggatattctactgctaataatcaaggagtatttatacatgacatgctttgtcttatgagaatagattttaacgtgtctttctgcataaaacaattagaaggaaaacaccaaacttaaaacattccagattttgggggtctagtgaaaatatcctgtatgttattgaatctgtagttgccaccaattttcataatagcaggacaaatactagttgagatatacaataatgcatataaacagaaaataaactcattttataagtaaaatttaaggctctgtgaagtatcagattaaaatgcatgttatatatatttacaatatctttaaaatatcattgattaaaaaccaaacgatctttataagacacattatagtattactgtaaaataaaacaacattcattgtctaaaacaataacagagaaagcattttattaggaaaaaaattgctatatgtaaaagctatttgaatattatttttaagaagaccacatagagaggttatgttttatctttatttctctatttattttatagctctttctctttgagtaataacactgaaatatgtttctcacagtagagcagaacaaggcagagcagcagtgaagactttaaacgaattcactgggatacagagaatctttcacaaagtactttgttgatttgcaaaggtaaacatagaatatataaaaatttaaatgaatcaaaaaataaaagaacagtatcttgttccaccatcattttgatttgtaagggagttttgcagtgatgttgttcatgactagcccacactcacagtgtttagctgaagtctgagaagtgagagattgatggctctgagacatatcagaaaaacatgtatctccttgccacactttagtttatgcatcctaatttcagaagttcctacatatatacaaatcataattaaaataaaaataagtgtgtatagtggaggttcccatcttgcatattcctactagctgaaacaatccatcgacagtacatcattttctcttctcaactatttattttattttatgtttaattcaatttttacactcgatattacacacacacacacacacacacacacacactcacactcctacttctccatgtcccacacctcctcctatcaaatatttcttttagacataaagtaactgaatagcatggaaattcctaaagcttgatttcttagagtttacattatataaacacttcatactcatgttgcaagcacaatgaaatatatctgcactaatgcaaaacgtttcacagcacacatttactgttcgagaaatgaaaccacaaagcacaaatttcaaggcagcaaaactatttgaggcaatcattctatttgagaaaatagtgtgcatctattatggagagcaacttgcaaagtgagtgctgcgaacagaggagatacagtaatcataaattatggggttaatgcatgttcatatcacacttggaaatggcaaggcagagcaagatggtgtccttagaaaaacaaatgtatgagtaaataaatagatctctaatttgcagtgtttgccccattgtgtaatataaatacattcaccatttcaaccatcaacatgatatcattgaatacagaattggcaaacaataggtggcatattctctcgctggctcctgcaaattgcctctactcctctgctggtaaaaactctgctgctgctttcctaagacactgccaaagaaaccatgccatataatttcctattggctgattagctgaatttatttaggtggaaactacagatgaggatgaggtgcccccacagtaataataaaatatgttacttttgcaggtaacaaagttgtaaagctattcccctaagacttggaatgcttttggaaggaaacaaaatcggagaaaaggcttggagggttttctttaaaaaaaaaatcactttaacaagtgctatactctacctccttcattgggctagagaaagtacccaaggagctaaagggatctgcaaccctataggagggacaacaatacaagctaacctgtatgccacagagcttgtgtctgtagttgcatatgtagcaactatgggaggagagacccttggtcttgggaagattatatgccccagtacaggggaatgccagggccaggaagcaggagtgggtgggttggggagcagggcaaggggagggtataggggactttcagaaaggggatagcatttgaaatttaaatgaagaaaacatctagtaaaaaattaacattaaaaaaaaaaacaagtgctatcctatttccaatattgggaactgttaagtatgctttgaggcatctttttcttagccattgcaagctcaaaaattgaatagggagacagtaggcaaagacctttttctttgcaacatggtatattaaatcttagaatttctcaaatcctcctattcccacatgatgcagaattgttttgaaattattgagtgtagtttaactacagttgaaaaagtatttattatataatctatagcttagacttcaagataaagtatttgatactattattttattgcattgcatttattcatttgccttcattcctcgtaatgctagtaaaaatgtctccatttaataattgttgaaaaatatttaaaacattctgataagaattccaaacagaatttttcttctcttcaatattccctagctattccaaacttgacatttaattaaatagtactataattatttctgtttcataaattaggtacatggaatagatcacttgttacaattttttccaggtttattacttaacaattcttgattaagcccattgtttcacaaatgtttactgtgcattcactataatcagttgcttttcgttttggaaggattcatagggaccaaaacaaacaccaaccctcttacccctttgttgtagtaggtaaagacaataagaaaaacaaacaaaataatacatgagtatattatgagacactgtggtacatagtacaggagaatatcagctgaggaaggaccaggagtgcctaagcatctctacaggggtacaattaagaaagctaggtgatagtaaaaagctaacgtatgtaaatatattgcagatcatcttcttcattcaaagcacagaaccccaaggcgatattgtgacttataccattagcaacagggtcaataagcagagcgtctgagagacaatgtcttgactgaccctatgtgttctttatccaatacagattgagagttaggagatgtaaaggggcaggtgattagcagctatcacagcaatccaggtgaatgaaggtgatcacttgggtcatagtggggacatgcaactggttagatttttataaagtttcaagtacatataatttgtgggatgattataggtaggatatggcagaaagagagagagagagagagagagagagagagagagagagagagagagagagaatagtaatagttctgattctatacaaatattgaatttaatgagataagaaacattaaggaaagaagaactttgccggggacttgtaaacaataaatatacttaatttaaaacagaaaagaagcgagcaaattttcttgtctaattctatgtattagttaaagtttgaatgagactatcaacattccatcattctgttttttaggagagaaatctaacgtgccaatattgacacataggatctggtatccacactttcttgtactttcatctatagagatgtatctatggataaaacacttggtacataagttgaggatatgaatttttcatccaagaaaccaccaaaagccaggtgtacacatcgcaatctgcgttgttttatagggtgatatgtgaggcagacacagattcctttcgagggctaacttaatgtatgcagtggttaatagcaaaggagagcctgactcaaagaatttgtcagacaaagacctgcacccaggatggtgcttttgtacttctttatgtgctggggaacacaaatgcccctccccaggtaaaaaatgttgtatttggtgctatgataaacttatttatacacagaagaaaggtaatttttacagattctcttaatgaatcagaaggggcagatacataattatggaaactgaattctgtggatgaacgaagagaaagacagtactatgataatggtcctagagaagagaccattgttaaatatctatagagttgtatagagtacaaattacagaatgtcagagccttaaatatattaagtctaaatattagtcaagtgttgctctgggcaccgaaattctaaaattgggtccactgttacagtcaatgttgctcatattacagacttttgttaagtgaagatggctatgcatttggaggaagtctgtcatgtcacactagtaagaaaacaatgagcatatatgtgacacatgaccaagattccaagaaataatcatggccatgtcataaaaagaattaaaactaaatacaactatttgagatgatgagcaatgtaatcgcccttcatactatgtataaatacagcaagatattatgctccattgttaaaaatatataactattatctgctaatagaagtaaataaaagatggtgactcccaagttctggctgagttaataacttttctactttctctataatgatcttcatttgtactctatgattggcactgtatgtactctatgattggcctgtttgcagcccctcaggattttatggatagagtgtaaactaaatatcagcttcctttctgtcttcaatgtgctccttgtgtaccacgttgtgcctctcatgttctagaagtttagctggttttctgctttaattttttttctgagattctattactaatgtatttgtactaagtgatgcatgttatagcttgttcactttctatactctcttcaagaaaaaaattaaataattccctcatttgtatctccctcactaatacaccatacaccctgagctgagtcctctgctccttccagcactgtcaaatccttctgtttcaggtacccttttttcccagggaagggaacttggcaagcagctatcagctggaacagatgtctactggggaagtgctgactcaagcctggccccaaaaggagtcagaaattatcctctgtgttttaccccaagaaacagaccagtaaagagaaaacctatatcacatgttatatctacactttacttatattattccttctcaattacctttcctcatgcctgcttatagaatacagcctcctcctcctgagacactgggtaagcagatattcacatagcttctcttgaccttgcctttcagaatgagagcctttgatgtatcactgtgttgtcaattctccaacaggcattatgtgtgcccctgattatgttcttcctaccctacctgaagcagaactcctaccaggaggctttaatggcaaacatcactcagctctgcaaagcctaagaatccctacggtagctgaagaatttaatgaggactgtctagtacgagaaggggtatattaggaaaggcttaagaacaatctctttgtaggtgacaagctttaatcataactgagatttaaattcatatcagtgatatatatccatttaagatgctggtgatccagtttctaatttatatcatagatggcaagactagagtaagaaagagataaaattggtcattaaagcaaatgaagcttggttaattattattatctttattattattgtacttattatctttttgagtcagggatattagaaatattttgacaagagtaagttatgtaatgtctgtgggcaaaaaaagaaagtctttaaacacttatcagcacagtgagaccatatcatacaattaacccaaaactttattcctagatctttttttctaatttagatagactggggttacatgaatttaaaaagaaattaaattgaatatgaaataacaatccaggttggggctagaaatgtccaaaaatcaacctttatttctaagaaaatctgtgaagagatggctgctgcaaacattttagcccttatgaatcaaagacattttattgctacttgaagacacaaggtctaaaatcaataaatgagtcagatgatgtttcatgaacaatttgagaaaacaccatgtttagtgggatcaataaattggtaaacaactttaatatataccagaattcaaaattttatatatttatttttatacttgtattatatataaaatatacaaatactttatgtcaatatatttatatttataaatatatacatgattgtatctatatatgtatagatacacacaatgcatatttttttttctaaaggtttttagaagcctttagaaactgctcagaaacttccatagtaaagcacactgaatcagaggagaagcattgactaagtgccacttagtggtctgcatgtcttagttttatagctctgtaaaactaaacatgacagtttcatgagaggtgtcgaagtcttagaagtctcccctcccattattttctgttaaatttttatatcatcttcacttatatttggtctctataatatttaaacctaaatttaaagtgtgtgtgtgtgtgtgtgtgtgtgtgtgtgtgnnnnnnnnnnnnnnnnnnnnnnnnnnnnnnnnnnnnnnnnnnnnaattggacaattaatacgttttacattgcataccattctaatgagcatggttaaatttagtggtgccctacctaatttagctcccagcatgtgatctcttcagcatgtgtatccaacctctatacgtaataacccttttgtagcaatcagatcaactgttaaaatattgattacttgaggccaagtaaaacttcttttattcagcaactatgtaaatcacaacaatagtgtttacaacttagacaggtagaaaatgaggttaaaaatgtaatcagaaagataaaacagaaaacaataaacagcaaacagtgttcacataacttttataatgctctatcacctttactattctaacttattgatctcttactatacttaatttatatgttcacatttatctgaatttacatgtaggaacactattgtgtatgcagtaatttttgtcatctatgttttcacacaatgactggattttttacactgtaacccacaaggataaggaagtactatagtattccccaagtgttaatacaaagaagttactagaactgtcccatcatgaaaaccttacacagcaggaaaggtgcctggtgccaagcacagtttagtaccagttactcacaagattgaatgaaatatccaactctcaaaagatgttcttagatcttcacatatacactctctctctctctttctctctctctctctctctctctctctctctctctctctctcacacacacacacacacacacacacacacacacacatacatatgcacacacacaagcacacactaacaaattaatagattaaatgtaaaaatattttaaaagggaaatgtatcagagaatagctgaataaatgcacttcattcttgacttcagaagtgaatcaagggttgtcattgatgatcccaaatcatatactgtcttctaaagaattctacatgtacatatatttttattttttatttttaaagtggaaataattcaggccatgacgcaacacatgctacagaaatgctctacaatgtacatgcattattaggcctatatatgtaatttttaaatgttattttttattcaacacttagtacagtcctaaagaacacataaaaattccactgttaatatgggtcagatttatcaaaatgcataactttttttttcagtttcaaaagtatcattggttagagcaaatcaacttaaccagttcagtgacattagtgtgtaggagcaggaaagaagttaaaacctaacatgctgaattataggtttttagcactgtcattcatgaggatttaaccttggtcaaatcacataatttttctgactgtatgtttttctttgttgaaaagatgatagtaatgttgatctcaaatagatgtcattacattaaattaaaacagtatatgattaaaggcttgaattaaatacaagttacaaggtataatattttttttactatatctgataattggatatgagccactaagtctcaagggctttacatttaggggtgagtagacttcttgtggaggacatgttaagcaatagagaacaaaatgcaataagtaatatgaagctaatgaattaagtttctatctgggtaatacatatagcaagctattccacaggatttttggtaactagacctttgctgtcttacataatactcgaatagcttatcatatgcttggggaaaaaacttagttagaatgaaaagaagggaagagagtaaaaatattctgaacctcctcatatgaatgcagccataccctggagggaaagatgcagtgaaagttcttaggaacagtgattgattgtcacactttgcaaccttatgatgtcacgataatcagctatcacatgttaaggtcagtactgtggtatccagattcatttcaaacagactcctgacctcagccattccagcatttactaagaagcgggtactttcctcattgacagtcttaagagaatctatgccttgacacactcaacattactctattgcaatttcatcccatacctttaaatcatatagatccatctccattttatgctgagaaagattccagaaaagtccatctgataagggtaatgtattttagctcatttcatggagtaatccaaatctttctctccacagtggaatattcatgtcaaacatttataaaatggattagagatatcagaaaattcccctgttattctccacaggcatcacagggagttagttcagttctttcctttctaggggactacatttaacatttcatgccattattatttcacaatgaagaattactcacagaaatggaatttcttttaaacttccctggtttgaaatgcacagaaactgtgcctccaagaaaaatgagagtattcatgagtggactatgactattgaaaatgcatcttcctatcatgaaagtctttaagagtatcacaaagtgaaatagcttggaagaaagaaacgtaggtaggaacgctaagatcactttggtcattatagccatagttcagtctagagtctgtgaaacaagtaactgtactggattaggctatttcagtgaacacaatgaaaggtctgttcatggctgaacatattaaaccctagttttcagtggctctgtagtgagaatcccagcttaatcacaaccaaacttgcccgagttttgacaattaacttaacctctctaatgttctgtatttgttaaaaaaaatctacaaataggtacataacatccatgatatagatcaactttgtctttactgtacaataagctctcatggtatgtcacattgagtatgggtggtaggagaaatccatggaagcaataaataaggaaggaagaaagggaaggatggaggacgggaggaagggagagagggaagggagggacaaacagaggaactaggaaaggaaagaaagattagaaagaaagaagataggagagacggacagaatgaaggagaaatgcaaaaagaaatgaagggaagaacggagattgagcaggagggaagtaatcaaggggccgggggatggagtgacaagaggaggaaaagagaaagagaaaacagaaaaaccatgacagtgagaggacatgtgttccctacttccatttaatttaattgttttcaatttttagtcaaattattgttattcaagtgacaagcagcttatgcccgcttatgttatcacgtgatctgtctctggaggcacgtgtacctggaattgttttttaaagtttcttttatgtccataaagcatagtttgttggggtaaacaaagggttacatcagacaggctagaatggaaaataagtatagtgaaaactatggcaaatcaaggaaaaattagttgggtcaaaagcatccgaaattctttgtaagcactgggtggctgggatggaggcattgcagcagtttattaacaataatatctaagacaagtgaaaatatctactgaaagcaaattatttctcacagaatgcatgttgattattagcaatgacatgtgaatgacagattattattcatgaattcaagaactgtctccacactcttattaaaatcaactcttattattcttattttacatgttaaaatgaaataacacatttgctttattatttaataaggtgcacaatatgaattggtcaaatatttaagaataatattacgatttcagttacttcttgtcagtttgtattattgctccagtagaacaatatttacccaagtcacaagtaaactataagtggaattttatatccactattaatgaagaacatggtgttctgctttttaatataaatatataacttatataaatataattatctaaggatattgcctagtcttaactgaagatgcaattttgctgtattttcttttatgtgtatatgaggatgtctgtatggggatgtctgcatgtgagttcaaatgcccactgaaatctgagttgttggacccagggagcctaagtaacaggcaattctgagcagcctggcaagagtgctagaaaccaaactgagtaggctcttaattaccaagttacctctcctacctccaggatattcaattaaaaattgcaaattcttccaaggatcttcttaaatatcttttagagattttttttcagtgaaaactgaagagagtaacaactgaaatatttttctgaaatgctcaattgcattgcctccttttatatttgtggtattgatgatgctactgttatcaaatcattactgtgcacctgacaatatgtaacctccagagcatatttcagaaaatatattcacagacttttactaacattattagccatgcaggtggtaccatgaccctttatttacaagaaaaatgtatgagtgcttaaaagatttatccttcagttttataataaaagaagttgagttaaatcttaatccatggtctttgaatggtttatttaatcctttaaaatataatacaattcatttaacatggctataaaattgaccttttactggaaattacggtctaaatttaaaatcatttgttttctatagaactttcataactttctaatgtcattgggcttcttagcagatcttattctcacatcaacgtaaatgggtttggagggcccttatatgtaagaaaaatttaatcccatatgtcaataaatagattattacatcattataatactgaatacctctttgtttaatgctgattgtgaaaattgaaatagaactttatgttatttaatcagaaaggtattagattatggtatggtctgaggaacttgcattaagagaaatatttgcacatcttagaatctaactgctgaagtggaaaaacaagacaagatgctgttttcccttgatgctctctttctagagaatagtattcatgggccaactccaaacaactgtgtacaccaaaagtaaattggtaaatgtttacagttatcagtattttgcaggtacacctatagtatatgacaaaacaaacaaaagcaagaactgagttgatgactttaaaaagagaaaagagagcaagagagaataaggaacatagttctcacataaagaaaaagacaagctatctgaagtatatcctttcctgtgtaagaaagcatttattgatgtgtcattttgatggggcatacttgtagaaagcatacttaatgagtcttaagtagaaagtgctgaattgctggcactggaacaaaatcactttctataacctactaaagaccaagaggaaatattatataaattagtaaggaagatggatgtgatgatcagtttgaaactcaaaaaatgttgaagaaaggcacaagccttatatttttagacctatgaaatattaagtgcctggcccatgagaaagaaaacaacatcaggagtttgtgcccttctgggtataggaagatcatgtatttactcgtacatgtgtttgtttgtttgtcaaatttttattacaggtaaggaataccagtcagtgcacatgtgctaggaattaattcaccacaatgtgtcttatgaagcttatttttgagtaggtgccatacataaacgtgctcagtgaaaccacagttggatatgactaagtgctcaaaataatggaagtcagaacgattctcaggattgcagtattatgcagaatagttaggaaatatttgtcggaggagacaacgtcaaagacagaaaaaaaaaaactaggtaccactagggtttcctgaaagttactattctagcataagaacttctagtaatcaaatgggattttcttcaagattgtataaaatcttgtgagtatctgaaactgtatttagatacatgagtggatgacaagagacctgatgatgatgatgatgaaactggagtcctcattgtaaatagtttatcactttttagtgtaagtaaagaataaacttgtatttcagtagagccataatgttgttattttgatgttaaattgggttaatgaagaggaaaacggtcttctaaagaacatgacttgagagaaaaaagaaatagtccatttaaaggaaagatgagcgtaaaacgattggtttagtggagacaatttgagtggacccactacagacagtgtttgaaaacagatatgagtgaatctaaatcccacggaatgatatgtgtcttcttctcagagactttaactgtttgagtaaaatgctgaaagatagcaaggagatgagaaagttggtgaatttaaattatatggcttacagtggtacaaacatcttaagagtacttccaagccgggcgtagtggctcacgcctttaatcccagcactctggaggtagagacagaggtaggcagatttctaagtttgaggccagcctggtctacaaagtgaattccaggacagctggagctatacagagaaaccctttctcgaaaaaccaaaaccaaaataaataaaaaaaaaaaaaaaaaaaaaaaaaaagagtactttccagtgagacaaggcaaagctgcaataaacatttttcttagaattttttatactcttaagacagttgttaacatgatgaacgatgtagttacaacatgcttgaaatggaaattatcagctatggcaatcactagcactgttactttatatataatacagaaaatagtttctttacttatcttcaataaagaataagaatgctaacattatatcatcctgtgtatacatgaaaagagtttattttgtgatacttgagaatacattcagtagtgaattaattttagatactactagttttctgttcattttttggatctattattgcctccaaaaattatatgctttagtagtaatgtgagactttaaagagcttacgctaaaatgagaaaactccagatttggatttagaagacttaaaatcaaacgtgggggtcatttcttcagcgtcatggcttgtgaatgctaggtttagttcaggtctcataattttaattttgtggaaataacttgctattaacttccaagaaaacactcattgtgttagatccacaaatgctaaaagtacaatacgacttctagtcaaatttgtttttcattggccgaggaatttcgggtctaagaaaaatagtcaccctcatcctactggcatagaaatagaatgtctgaatttcaatggtgcatcattagaaaccgccaagtgaaaaatgattttaacatatcatcactaactactaattataaagtagcacacatatgattttgaagctggatttcaacttggcattcttcatcaaatataggcatttatttgaatcatgggtcattaggaacagtaaaataaagtcagtatttcctctcataatgtcttaaaccaggttgttgatattatttatgggtaactaatggaattaaagaatgactcaaatataagcacttagcctattatgattccatctatattaccaaaaattctaaaataaacaacagtaacaacaacaaaataagaacacatacaatatccccacagtgattcttaaatataagttttgaatctgtatagtccgagtttaatttaaacattttgatcagtggtgagacatctaggagcctttttctgtagaggctcactcaattttaagtgaatcctaacatttgcatccaattatgcattggtaaactcaagcaaaacatacaggaaagagtgagttttaagcacttagataagctttgtcagtatgtaaggcacttatgttttttccaaagcaaaagaaaacaatatatttcatcagaaatgatgcttggcactatggtgactaaagatgacaaactaaaaataatatatattgttcattagagggatatcagtcattaaagaaggtactaagagctaaagcctaaaagaaaatgtgtataaactaagaaaattgtatttatggataagtaattaagcacaaaatatatgatcaaagacatctgcctactactgaaatgacattaaggtaaatttgaaattcaaatagttatgaatatattcttgtctattttctgaattgccttccttataactccttttccatgaaatgtcaataaaagaaatgcctttgatgttcaatacattttgtagcataaatggcgtatctgaaagtgccctatacaaatattagagatcctgcatctttgggatacaaaatataattcattaaagggacttaagtacagatgaaatatgattagatgtttgcactgccttccctttataagaaaaatcataaagttgataagagatcattgaagggattcctagaggaaaagaaaaacagaaagggtgatgctagagatgtagcatgtggcaatagggcttggtttggttttatatatatatatatatatatatatatgcacacacacatatatatatatatatatatatatatacatatatatggttgaatatatgtatatatatttggttgaatatatatatatatatatatatatatatggttgaatattgaatatatttgtttgaatataaatataggtatttagattctctaatcaccatctacttaactgaaaatgcaaacatggaaggcacaaaaagtaaaagtttttatttcagacactgtattctttcatagatagctgaaaactgaggacattgttaccttatacactcatttattttataatgccaattcttggatattagtcaatgttcactacaataaggggaaaaggtatgagcgatgagcatcttcatgatggctgtgacaatggttcccaaactgtccatgtgtaataggggagggcagtatccctgcttgttaaattacagatatcctaagcaccagctccaaggtggctgtcatgagacaagatttattttactttagaattcattacaaagatacacccatacatttttaaaattgtttataatttaattggtagttatacctttctacttcattcttcaaaattaagtccattttgaacagaagaagtttttttcattgaatgtgatctcttaataattctcatattgtatcaatttaaacaaagacttccaggaagtggtaaaagattttagcacccttcccagtctacattcttcttgctgcagaagagccacttatgtgtcagcgaagtttagtgggatgtctaagattaccgagcaaagagaaattgagagattcaagcctcttttttgtttgtatgtttctatttataaaattcttccacgccactacatagtcacatagtcaatttggattgttttttacttgaacataaaactgaatggaagacacagaggaggtcacactgagaaacttcctttattacctttaaacacagaagcagattacaggacctggagcatcagcagagccatgaggcacagggccactgaagaactggctctgctttcagcttgcctattttctttcttttcacgtatgttttcctttaaactgtaatttttcacatctgaaaatgttatgtatgtaatggactttttcatttgttagctaatatgcctgcaagagtgtctcctttttgcagaaaacacaaactgcttgcacttaataatatgcagcatctgaagaattgagtaaacacattctgacacctccttagcatcctgcaatactttaccccaaacaccgagaaaacatgtggaagaggacaggtgaaagtgagttactgagccattacagaatgctgaatttttctttcctgggaaatgtacatttctattcaatagcttacatcttagaaggaaacttaatgcttaaagaggcaaagttaaatactaggtgacccacattaaggtggaaagagtagtggagggcaaaaatccaattacacaatgttggagaatcttttactaagtcaaaaggactgaacagctagaggatgaattttaaaaatgacagatgatgcatgcccatattcttgcagacttctacgaataaaagagttgttgagaacaagtttctggggtgtataatttgcaagcattgcaaggttctggcaattacaattaaaagagattgaagtgatctaacaaagttattgagaatggacctgcaaatgagaaatgataattcagtccttttacttaaagacacaagtctactgatgactggtcaattttcaagcaggagcaacagtagcttgagagaaaagtgtgtgctgctgtcagatgcgttttggtgccaaaattgttagataatgtgtttaaatctaaaaaaaaatgtttagctttcctgcacaacagcttagggttgtgtagttcataagttttatttataggtaggctatagagattatgccagaaaggaaggtttcaagaaaaatttgccatttatctaatgatgctgaagtttggatgtctaaaatcatgatgtaaaatagatgatattaatgggttgtttataggtgaaaagctgtgccttgtccatctcttggctttttcttgtgtttggcatcaatcttttaaaactttttgactagaaacattcctttaacctgtgacccccatacacattgtcctttattcctggacatgcctttgtatcatctcctccatctaaagaactccagatcatgtttggtcttgtatcaactcgtttcaagctagctaataagcccagaaaaaataatcttgaaatctgttattctgttctaacagacattcttctacccagtgcatgtgctgggtataatttcttattgatttggtcagtagtataggaagaaggaaagataagagtatgttcacttgaaagctgtagctcttcccatatccaacaaggagaacggacattttacaaaagattccagatcggtgaggtggttctgctttaggatttataagatgtctgagaataaatgatagttataatatttatcattgaaatttgaatcctctcgactacgaaagaggtgtactgatatattagcaagcattaatttatctatcaagccatgttctatctaatttaacaggatcatatgcctaatctgtcaaaaagaaagaaagcatgaagaaaggaaggaaggagaaagaaaggtagaaaaaagaacaaaagaaagaaaggagagagagggatggagggagggaggaaagaaggaagggagggagggaggaaagaaggaaggaaggaaggaaggaaggaaggaaggaaggaaggaaggaaggaaggaaagaaggaaggacagatctttaaaaacaatcaaggatattattttgggcagataggccacactattcaaggcgttcctccttcctgttaattaatgggcaggatgaatagcacacaagcagtggagagcaaacaggttctccagagaaaaactttgacagattagaaaaggatgcaaatataagaattgggatttgatgtagtgaactggctacagagatgcgattcagtcctcttttgagtaacagaggggactacttacagaggaaagacacatgctggtaaagtggttaactatttgagagtagtatatttgagttaattataacatgtgcctgactttagcacagccatggagtagtggcatctatagttctctgtagtcttcagctttaatactgacttcatacaagtgtttgcaaaaccctccctttcctgacttgaaatgaaacatataattaatgttatcagcctcataataaactattgacaattagaaataaccataactgcttaactgtaataaaaggaaagcaattttaaaggtacattgatatgtaaatggaccaactcttccagtgtagaaggtataatagagccttcagatgcctccaactccactgggagttgagttgtgattaagaaaactgcaaatgcaggtatcttagatgtcactgctgccttaaaaagcttgagtaggaaggacatcaggcacaagatatttttgtaagttttgaacagttctttgcagatctctgaacaatatagaatatagtcaccctggatatacaagttagtacttcagagaagcttaatgtgtttttaaacttgtccaactcatgaggttgcattcatgagagaacaatgtgctgtgcttcatagtatttcatgccagaaaaaattggtcttgtatggcctttatggttgtaggttgttggcactaaattagtttgcatggtggaaacagagaaaggcagaatcacacagagagagagagagagagagagagagagagagagagagagagagagagagagagagagagagagagaagagagagagagagagagaagagagagagagagagagagagagagagagagagagagagagagagaagagagagaaaactaatatgtgtttatatgtatgaaaagcaaaattagcagatttaggctacagaaggaatttcatgtttcagtgtttgcttttagtttatttctttttctttggttgtgttttggttgagagaggctgtcactatcttggctaagaatacaattcactatgtacagcccagcttggctctaaattctttatcttcttgccttggacttccaaatgatggtgttataagaaggtattgctaaatccaggttcagcttttcatatcttcaggttggaatttttttttagggtgttattctttttttattttattagatattttctttatttacatttctattgttatctcctttcctggttttccctctgaaaacctcccaatcccctcccccttcccctgctcaccaacacacacactgctgcttctgggccctggcagtcccctatactggggcatagaatcttcaaaggactaagggcctcttctgctattgatgaccaactaggccatcttctgctacatatgcagctggagccatgagtcccaccctgtgattttttttttttgtcccagggagctctgggggtaatggttagttcctattgttgttcctcctatggggatgcaaacccctttagctccttgggtactttctctagctcctccattggggaccctgtgctccatccagtggatgactgtgagcatccacttctgtatttatcaggcatgataccatattttaagcataatttgagtgtcaggcagaacacatatacccaacaattttagacatccaatgagttctcaaaaatctaaaatgtctctgagaatcaagaaaatatgtaattgtaaatttttaaatttaaagtgtgtagtatgtagttttaaataaaatctgcaataaatccatctaatcagcattggtggtcttgcccaacccaaaggctagctcaatggttcactgactgggaattgaacttggccagttcctgtggctagcttgataaactaaccaaaccagtttaacctgaaatgcctgaagcttcagcttgcatttctcaggccatgcacctggggttggccttcaggacaccagctaccactcactcagctctccttagccctgtaaaatgaaaacattggagacttacaccagacagatttataatggtagatgtccaaccccaaaatgcctgtgcaaagaacatgcaactcagttaatacaaatacaagctgcatgcctagacagggcaaatcgactctattgctcagctatgaaatccctagctacttgcagttcatccaggccatgtggatctgctccagcttcccctctgtttcctctatcttctattccctccatcctccatctcttcttctctttatcccccttctctcccttctccaaaactttcagttctgtcttttccttccactacccagtcgcaggcactagcctttatttgaccatttaaatttttacctgacatcacctgagtatgtgatctacttctcttctgggcacccttcttgagggagcagaaaatgcaaacaacaatgcacataaaaagtaaattatatttttctgtgtacccaatgttacttaacattttcaatgtatttttgagagatttcacttaaagccaatttcaatggtttcagtccatcatacaaattaaatattttagatttctaatcctgctttacttaattttgtgaaaaatttcagggaagaaaaggtcacagaactctcctggttttgtgtattttcaccaaaaaaaaaaaaaaaaattaagatcatgtagtcaatatgaatttgggtaaaactggtgtgatttaacttttttgaacaaagaaacagacccagacaccacacctgccagttgtgtagttagagatcaaagcaataaatgcaagcttccattgtaaagggattcagagttcaaatagaatcccatctctagggagttgataataatcccattgactgatcaactgagatattatgcaaatttatagctaaaaaattctcaacaattatgagacattaccaactaggatttttgtttcaaatcctacctgctaagaaaattttaatataatcaggaataaaaaatgataaaatactacacatgtaaatgtttatttatatatgtttttatatacctacaaaattttgtctatatgaaaactttcaatcttaaaaaatcttgttttataatcataaattcatacaaaatttgttaagcaaacattaaataatcttttcagtacatattaatcttgtttcttaagttgtgttactaaacaaccatacaatatgaactctccactaagatctctaaggacaatagagggctgtttgccacatatacactgttggaaaaacttttagaattgtactaagttctgcactcactaaagccaacaattcctttcctggttattactagcatctgataatcactattcaactttctaagtgtataaaatcttgaatttattattttcttcacaaaggtataaacagatgttatctgcaaatttttatgtacattgaaacatttgacaaaattgttcaaagctatatacattttcccttctatatgtaggtcatggtatttttttgtttgttatatctgttaatgtatgaatgggcatttaacttgttattcctcctgtatattgcaaataaagctgtaatagatgtagtagtagtatgttttcgttatttttctattgctgtgataaaattttgtgaccaaggcaacttttataaaaagtttataaaaaaagcatttaattggtcttaatggtttcagaggataaagtctttgatggtgaaataaaagtgtggcattaggaacaactaatagctcacatcttagcccacaatgcagaagttagagcaatcacactgggaacagcaagcacccaccccactcaaacagcacttccagtgaagccacatttcttcctttccaagcaactccaagtgttgatgaagtgttcaagcatataagtcagtatgtgcaattctcacttaaaccactttatagtgaaaatatattttgtttgttgttttgttttgttttgtttttgttttctttgagacagggtttctctgtgtagccctggctgtcctcgactcactctgcagatcaagctggcctcgaactcagaaatccacttgcctctgtctcttaagtactgggattaaaggcctatgctaccatgcccagatgaaaatattattttttagaccctaatgtcaaatactttgaaaatatctataaagaagattctgtagggttatacacggattccattttatttatttacatttttttttaaaactctggcatatttttcacagtggctgcaccatgttacatttctaaaaaatacaaaagctgtaatttctttttattctgaatagttttttctatgggttttcgttattttgaaaataataatggtaaaaaaccacatgaagtgatatcttgaagttttgccagttcttactaactcactattttcaccatgctttcatgtagggcttgactctccggatgttttcatttgagaattgtcattttgtattctttgccatgattttcaatgggttgctcattttcttgttttttacttacacgagttgttttatatgttttgttttgtgactacttatcagatgtatgtttacaaatattgtctcccatcctgtagattgcttttttaccgtgttgactgtttccattactatgcactagcacttgactttgatatatctccattttcttactcttatttttatgcccatgtttctcttattgtatcccaaatattattgccaaggtcgatataataaaactttcccttttgttttcttttaatttttttttacattttcacaccttacatttaagtcatctatgatttaaaaaaatgagatatttttatgtagtaagatcctttcttttgtgtatacacaggttccttaatataatttattgaggacactctcatttccccattgtgtagttctagtcctacgttgaaaatcaatacctaacttccttaatgtcggtttcatagtgctttgattactcgcttctgtaattcattttaacgtctatcatttgtctcccaattgtgtttcaaacatcacacattctttgtggttgactaaaaaccttagggcatttttaatatttgtcaaataatgctattggcatttggactgggattatactggttatgggttgctttaagtacaattaataactttttaatctacaaacaaaatcaaaaggccccttcaacttctttccctggtcatttttcatctttagaatttaagtcttgcttactgtgttgattttaatgatacttcatatgtgattatatttcaatatctggtcccaagtttgtggaagtgtttggaaacagtcagagagtgcatcattattgcagaagttattttactagcagtatgcttcccattgtcaaaactctatccaggcccattcttgctctctttgcctcatatctgcttcagatgtaaactatcagctctatgtggtataaccaatgagttgattttcctgtctgtttaccccaggtataattcccacatacctttcacatcttttctagatatgaacgttctttgaacatctgtgtataaatgcatgagagattgttccagttcttccttcaggatctaccactgctgttcattctcaggaatgcctgacatctgaattacagactctttgcaagtcatccaagtcatgtgatctcatgatgctctccctgagcttttggcttttagaatacttcaggtaccatcttttttgttttagaatacttcaggtaccatcatcatttgttcctgaaaccaagagaacggaaccagttgtttcacaactccatggcctctcaaaaatgacagatgtaggacatacactctattaatcttttttcattatgaaaaagcctagaaagttatagctgatctttgcctgtagtgtcatggaacaatagcaagccatctagacctttggactatcatccttttgcagataatcagaataaagtacatactctgcatacttcaaagcaggaggtaaagtactaggccattgcaagctctcaaggaaccaaaatatggaacatagtttccaatcttttcctttggtctctcttcttctttcctcaatcttcttttctcttcttctctatcagagtacattgtcttagtttcttcttgaagttgaagattagttaattaacatcaattctaggtttgttttatctgacaacagttttattttcatcactttgctttgcattattattattttaactccaattttacaagtgtaaccccaatgttacaattacaatgccaagaagtgtaaaaataattccagaccttattttagcacaattcacaattctttctactctactatcctgttaagtttatgattgagaaattgaggaaacattttcatctgtaagtgttagctttaattatttctaatttctggccttctaaaaaggcataaaatagaaaggatatatgagctgaaattaaatccaatccactgtaactactaaaaatatgataatatgatttaaagcaatggcagctaagaacagtgaggtgtgttctctgtatgtatatttaaaaacaccatatgggctgggcagtggtggcacatgcctttaatcccagcacttgggaggtagaggtagtcagatttctgagtttgaggccagcctagtctatagagtgagttccaggacagccagggctacacagagatttactgtctcaaacacacacacacacacacacacacacacacacacacacacagacacacaccaccaccaccaccaccaccatatgcatgttttaaaatatcatatctcaaaattattttaataaatattcaggttaactctcaaattagttctgcaatatttagttttggattagtcacttatgattagataaatttttactgatttctactttcatatttatatgtgtgactaaaagtgcatgcaaatacacatagaaagatttaattcataataatcctgtgtcagtacaccaatgattcagatatgtgacaactaagatatctgtaaacttattatcactgttggcacatacatggggactttatacagagtaaattcttatgtcaattttcagaatatttatttaattttattcttttctataaatttgggactttgtccagtagaagccttcacccctccaactgcaacatccattatctgtaaattttctagttttggcttatcctaatcacatgtgaaaattgtattgaaattttaaataaattaacttagtgaaagtttatttggtgctatacaatgaaccaactggtcaaaggcaattacctggttctgtttttcaacatgtcctagagaattggtgtgcactcaggatgcacaaagtctataagtgcgctcaagtctgtgctgatttttagccaatcttctcagctcagaatcctccctttttatataaaccctactaagatactggattttctacattagcattcccagttagtgtctgtacaccttgcatgtaatgtttccgggaattaaactaacttgaatgttaggatagatgccaaagcagttggtcctcagatgtgactgaaacacaggaagaaaattttggcagaacatgtttcttttaatgcctgctttggcaggtgctcagcaatgcacttcaattcacatatcaatctagaaatgatgatttctctagtaattatcaaacgctactgctggtgcactgttttagaaaaaggctcgtgcaccagtggctttgtgatgctataatgacaaacttgatgctgacaggatacatctgtaccactagtaactgttttcaaactcatttggcctttctatttaccattctttctacatactacctgtggtcttctttttatttttcttcctatggtctttactttatttcagtatttcacgattttggacatttaagtaattaattttagttattttgccctccccattctcctttctaagtcttcttttattttgtcttttaatactttctccctgagcttaattagggttgtctacatgtgaatggggtgttacctactggttcaaagacagcttattaatggctacactatcgaagacgatgacacccatactctaacaactgccaattgtttttaaaaattatgagacctcatggacactcctccaatgatgaggagtgttgacaagtttaatcttgtatatgccttctgttgataatattagctgcattgagttctggccacatcatgccagggaggtcatttttttttttttttttgctgacatctttgtatattcttgttcttacaacattttatccctttcttaaagatgctccttaagttttggagggactggtgtaattgtttcatttagttattcttggaactttggctaactgtatttttctgtaataaccacagtgaactgagaagcttctctcaaaaaggctggattggaggtctctacaagaaataggtctcaaataccaccaggacaaaaatggctatacatacaactaacactccacaggtgcactaaaaggcttttatttcttagaaggccattctttctttagcaggattcagagcttagtaaggctgttgataattacccctccccccatccccacagcagactgagtagtattttctcccactacgaagtttatctaacagtcaagaagattctatatcagctccaggttaatatcttaatagcatatgaccaaggcatgtaaagttattcattggtaggagttaccatcaaatccatcagtcatatttttttattttgagtgactttagggtcttgataacaagatcaataaaaagatagtcagcttgtcttttaaagatgcatggcaattatgtatgcatgcatatgtgaggggccacttacgtacctggggacatgtgtagagtttaggggacagcatactgaagtagattcggtccgtctaccatgtggatcctagggattaaacttaatcaaggtaccctgtaggtttccccagctgccttttatcattgttccgctgtagatttctctttacttttgaattttgtctgagtattttttttttcatgagaagttacaggtcaaacagatgagcggacaagggaaatttaagaaatgacaaagacatataaaacatataatcattacttccgtttaacttaaaaaaaaaaaacaaaaaaaaaccttttctgactactggagtgctataaagtaacaattaacactgtactctgagctttccctaggcctagaagtttgtttacaagcagtgccctagttataatatgcatcttctctctttcttaccccttttacttttccttgtaggcaatcagttacctagctataaagggactccatttttaaattaattaaaaagaagatgaaaggagagagaaattatgtcagttgtttcctgtgttgaggtggtgcttatgaattagcacatttttaaatgtactttcctgtatacatatactgagcacactggacaagctccccagataactcttcctctggaggtatggaacaaccttaccttcccattgcttccatgcaagattaggtttatacctacaaacatcagggtgagtactatgttcggaatattctgatgaagataacaactctgtatctatagtaagtttattctttcagaaatatttgcagggattctaaccacacatgtgatagtattatgaagtatgtctttgataacaagattgactttattattaccaagtttcttctaccatgtgtgatcacaccaagaagatcgaacttatgaagttcaactggataccatatacgattgctgatataagatttccaagatgtcaagaaaagtgaaggactgtgatactttgtcaaacaaaacaaaacaaacaaacaaacaaaacctcatgatacaaacaagttatatggtagacttaatataaatttaaataaaatttaagtttaaattcctcataatgtattgttttcttaatctcaatatttattttctacctttaaactccctgttcatgtggatcttctctctttttgtctcttttactgtctttatctctgtctctcttgattataaatggacttttaataaactctattagttattaataggacccagccagcataccaataaccaggacaaagtcctatgagtttatttaattacctcttgcacaatgaccccttctctatttttctctaacttagactattaattcccagatgtgctccacaaatgcatctgtttggtctcgccttagttgcttcttctctagcagtctgtcctggggctgggagccatttctctcaggcatgtgctcctcgtctatcacttctaatggagacttcctgttctctctaatattcttcctccttcattctttctctccatctactttctccttcctttattcacccagccattggctgtagtcaatttattttaataaatggctttaaattgcagagcaagatttacagagcatcacttgatatccatgaggctgctcatgggggaagggggtcaaccagatcttgggtccagtagcatgtgaatacatcgcagcaccagaccaaaccctaacacttgatctttcattctctttcttttcatgtttttgttttctttttgcctctttcttttccttttaaaattttcagtagttacgatggaagaaaacagcaaacttcccacattgccatcagtgtacttactctctggctaacagaaccaggcctcttagaaagtagcactcattttcacttcggttgttttctcatgaacacaatttgcacacgtgtatcttcacctgtatccaagctctccagagaacacatgtctccaactgggatttcaaatgagtttataaagtaggaacacacaatatttgtacctgttaaaatatttcctgagaccagcaggaaagagaaataaaggtcctttaaaagttccccaaagtttgttcactcatagttatgtgtaatttttatttcactatagaataagcaatagtcaaatgcagtaggatttcagttctttttagcataaagcatgttaagtgttctttactatgaaaggcaatatgcattatttagtaggacctattttggtttttttttttttttttttttggatttgtgatagaaaggagagccatatccccactagtcaagtacatgatgactgaattacattccttgccctcaatttttagtttttgtttcataataaaagtttcaccgaaattaccatactaactttggcctcaatttgtaaaacaagaagacccttatttacagttctcttgcctcttgtcttccaactaattgggttacaggtctgtaccaccaggcttggctctgcttctgccccacataccaccagactcatcttttaagtaagtcacattatagtcataaatcaaaaacattgtatctatgatttaaaagatagatttgacatgtatctacatatcaaagcaattttgttgatgtatgaaatggcgaaatgatgatgataatgatcataagctgaaaagaaagacattgaagcaaaacagatgtggttatagagtggtttctgaacatagttgattagcagtaaccacctggtcaattttttttattttttactactaagcctgatttataactggcctgcagaccattggaatcagaacttctggaatgcaagcataggtgttatatattcaaaaatacccatgtgcaggggccagtctcagctatttccaggtctcaaagaggagataaggaactgtaggagaaagagagaatcagaagcagtgtatcctaggaagagtcttttaacctgatctgcgaccaacttctctagtccagctatccttgtttatcttttaatgttacgttgttcttaaattgagtttacatgttcctaagtagcacaggtgcagatgttttaagagtatctctagtcagagacttacaagggaatcctggcattgatatttgagtcataacttccagggtgtaaggaagaccttcaagtagggccacataagaatagctctctaaaagagggaagggtagtgtgctcaggcctttctttgggaagtttaaaagcagtattcttggaaatacataagtgattcataatccaatatccccaagttgtacaaatattaacagttcctccacctcccccaagcatggaacaagattacatcatttggctcagctttgctggatccttgtcctgcatctgtgctttctctgtttagactttccctgttctctgtagacatggctgtgctacccatgcataaactgactccacaggagaattaatagtaaagacagaacaaataaagaaaaacagtttattgtatacatgccacgtagaaggactcatatggcgaagaaaagtgggtagcagttgaattcagtgctaagaagggaacactcagcaagaaaatgaaaaaatactagatgtatagaggtgtacaaaacatgtcatggggccaggcagtggtggtgcacacctttaatcccagcaattgggaggaagaggcaggaggatttctgagtttgaggccagcctgggctacagagtgagttccaggacagccagggctatacagagaaaccctgtctcaaaaaactaaaacaaaacaacaaaacaaaacaaaacaaacaaacaaacaaaaaacaaaaagcatgtcatgggttactaaagttacatgttttatgggaatgaatgatttttgatgaagaacaaagaataaactttcgtaaactatgtaatatgggtattttgtggctagtgaatcaatgaagaattaatttagattgataccattatatgctctgtcctatgcctaacttttaaagacagctttttaagagagtagaggccacattggaataaaactgacaacataatcagaatgcaagtaatagtcctcttcaagtgggcgtagcaaagaaaatataacctgcatttttatatcagaaaaaaattaattttaattttttaacccagtcttcagctttccatatcaaggtaatatgatacagggaaaaccaaataagatctttcttggtattgcctagctctgttatttattcacaggtgatccaaaagtgttaatattcttgcaaagtatgagatccaagttccaatgtcatccttagaaggaataaaggacacatctttttctggattttagatgtttgaaatatccaggagacatgtagtaaagatatttctccataggacgctatgggtttactggcataatcttagtaatctagtcatagtcttctagggaatatcatacttttgtggcagagagaggaagcaaaccattgctggctaaaaatttagccttgtcttgtcagaaaatgctttttataattatattattatatacataggatagaaacgaagcagaattgagggataatacaaattcctgtgtcatcctagagtgtgatacatcctctgcatgtctcaggtgtatcattaaatgaaataaaaattccttcagataaaagttttatcaggatcaaaaaatacaattatatctctaaatgatttaacagtacctagaaaacactgcattgctaaggaaagtttcagtgctagtgcctcttattgttttctttttaattaggtattttcctcatttacattttcaatgctagccccaaaaggtcccccatacccaccccccaatcccctacccacccactccccctttttggccctggcgttcccctgtactggggcatataaagtttgcaagtccaatgggcctctctttgcagtgatggccgactaggccatcttttgatacatatgcagctaaagacaagagctcctaggtactggttagttcatattgttgttccacctatagggttgcagttccctatagctccttgggtaatttctctagttcctccattggggaccgtgtgacccatccaatagctgactgtgatcatccacttctgtgtttgctaggccccggcatagtatcacaagagagagctataactgggtcctttcagcgaaatcttgctagtgtatgcaatggtgtcagcattgggaagctgattatgggatggatccctgtatatggcagtcactagatggtccatccttttgtcacagctccaaattttgtctctgtaagtccttctatgggtgctttgttcccatttctaagaaagggtaaaatgtccacactttggtcttcgttcttcttgaatttcatgcgtttggcaagttgtatcttatatcttgggtatcctaagtttctgggctattatccacttatcagtgagtacatattgtgtgagttcctttgtgattgggttacttcactcaggatgataccctccaggtccatccatttgcctaggaatttcataaattcattttttaatagctgagtagtattccattgtgtaaatgtaccacattttttgtatctattcctttgttgagggtaaccaaacgaggagttggttctttgagaaaatcaacaagatagataaacccttagctagactcactagagggcacagggacaaaatcctaattaacaaaatcagaaatgaaaagggagacataacaacagatcctgaagaaatccaaaacaccatcagatccttctacaaaaggctatactcaacaaaactggaaaacctggacgaaatggacaaatttctggacagataccaggtaccaaagttgaatcaggatcaagttgaccatctaaacagtcccttatcccctaaagaaatagaagcagttattaatagtctcccagccaaaaaaagcccacgaccagatgggtttagtgcagagttctatcagaccttcaaagaagacctaattccagttctgcctcttattgttaaacgtataatgtctccaacaagctcaagtgtgaattcatggtcccaacctgatggtgctatttcaggagggagaaatattttggagacaatggttaggtaaacaaaatggttcactgaaaagatttaaatgtgctatacaattctggatctggcccaacaccctatttccagattcaccatgatgtgatgaactaacactgttaccagggctttggccgtgttacacaaaaccacctcagttatagactgaaagccactctattattagacaaaataaattcttcctcattgagtagtttattaggtatttcattatagcaatactgaagataactaacaatgtgaccactgagtggctacaaagttcaaaacttaagtccaaatacttctgtagttcttaaattttggatttctttgatgctgtttctggttcatctcgcatgctatatacaaagatagggcccctgttgagcattttctacttgactaaaatatacgggccctgtcatttttcacttatcataaatattcatttataaacttataataagggttggtatattttagtcccttctctactagacatagataacagttatttatctagcatcgtttcccttggggccaaatgttttgacatagagcacattaggcaactcttatttcgttatttatacttctacactaaatcctcaggggtttctatactttaatgaatttattttgctttagtgtcactatttctgcctcttttatatgtcatcatttattcatatactactcattcctacaaatttttgccataatcatattctgttctaaaatccattatagagataatgaatacatctctataaaatacctatctgacaacatctagtattcatacttaggtagaaagcatgccatgtaaatagatagtataagactactttaaagaatcaggagcatgataagaaataaagcaagatactttggtggatagtagcaagatggaagtagagaaaagtggctcataagaagatttttctaaggggatattgaagccaaaacttccatctaagtgaagagctgtgggtggtgaggcaaaagttttacagatgaatgtccttagccccgagtcttctatataaatgggaaatccagccctgccatcaaaatacaataagaggacatcataggcagtgttagaaagatatgcagccatccatccatgtgccctgaaaggactgaattttattgtgaagcctggataagatccaatactatcttcattctgatttctccccagtgtggtctcatcttttagagatgagactgcatcctgtgttcattttcttgtcaatacctgcccagcatcccaacctcacaaattcagagcaaagtggatgccgaagaatcattctacagtcattttcactgcatgcacctttcttcatgctggaacaagcaccctagcaacttttctgttcaagttcaaatatagctacatagaaaacatgcatctattagaaataacactgtttacaattatgaaattaactaaggaacacagtgtgaagaaaaattgtatgtaaatatatgaaaatggctttgattatttagtatattaaataaaacaattatcattgagtatgtaattaatcaaaataagattcataaaataaacattgacagggagattcaactcagtaaagagacagtgcaaaacatcccagctggacttgataacaatagaaacgctcatcaaggctgatcgtttttcatctgctgtttggtacctgaagtgtttaaatgactattatttgccaagaactatcttagtgctttgtcagtgactgaataatagaattctcttttttgacctgtgtattcgaacttgaatgcttcattataccctaaatcaacgactgatatggtaaagcttgttttatgtgtgttcatttgttggtttttaatcttagccattttttggggtctgagaatgagtcatgttttagtcatttctcggttgacgtaaaattcaatgtctttgacaaggaagttagcccacctgaagattcaaagatggttaccattttcttctggcacatagggagaaagaaaaaatgatgctttaatttgaccgaaagatagacacagaataccactccaaataaccagtcttacttgtcctatgtgctcatccacttgagtgtctctccaatttcagaggaaagtttagcaaaaagactgagagtcactaataaatggggttcacttttcagattatgtgcctaaaacagtaaaaacgactttcagaattcagtgacacttagattccatgattctcctgaacctcagttgatggctatgtcatgttttcagagataaaaatagggacaccgttggctacttttatttatggtattgggcctttacttatggtctggaaaatccgccccccccacacacacactgatacacagctatgtaaaaaattgtttagctaagacaaaagtcacagtgtgttgctgctctgacaactcaactctggtaaaggcagaaagctaaatatctaagtaacaatgtaactctctccaactccaacactctgtgcttaggcactctgcttctttattgaagaaatttaaagaagtgaagtccatggtggcaatgggttccttccttcctttaataggtttctcatattgctttcataccacattgttgtattttacacaaactcagtatctgtggcttaaatgatggcaggtggtgagtacagttttagtggatttatgcctaagacaataaatattgtccaactataaagacaaacttgaacaagacaaggatgcttatattcagcatggtagaactgagtttaagagcagacatatttgtacatgaacctagggactaccaataagctaatccatgcaatgttagatgaattgattcattatcttttgactaacaattggtttgtggattaatatggtgcacaactttgaagaaagtcattaacgacaagtacattgaatgctaaccagactaaaagcctgcaaccaaaatgttaattgtcttttttaatagctatatcctgaagtcagaacttgcctaaatgtaagcataattcagacaagtgtgtttcctgagctgatgatttttaatgtgagcatacatagcactgtgaatcttagtctccaagtttattaagccatatcaagttggcatcttcaattttaaatttatcactgttgtttttttagacataccctattctgtcttgttaaaaatagacaccgaataaaaacttttagattttcatgatgtttgtacaaatgttttaagtttgatttctatcttgctagggtaacaagtaacttatactttctgttccttagaacaattcccaaggtctatgaaatgggttctgagtttcatattgataccatgttaatgtcattgtttattcatcccaagagctgagacaaagttttttattttccctacatgcctgatactttcatgtttgataattatttctattctatactggtattacaagaaacttagtgaaaaggaacatgtaacatttggagctgaatgcattccacagccagtctcacatgccccgtggtcttggctattagggttctactccagaaaggtgttgcctttcctctgccttgttccaagctcctccgcttcttctaacaaaacaccccttctctcgctctacctaaactaaaatatattaacaaactgataataactttgctctttacagaattggagaaatatatcgtctatttcttcttgtcattcttttacctacaaagagtcagttaagaacaatggcacttttcaaaacttgaagaagacataaaagcaaagaacaaaatatttgacaacttagtattttgaaatatattgatctcttttattactttagtatcatgtaaatacttcatcaaagtgtgtttctgggagaaaataaataaaagaaagaaaaggaaaggaaaggagaggagaggggaggaggggaggggagggnnnnnnnnnnnnnnnnnnnnagaggagaggagaggagggagaggggagggaaggggaagggagggaagaggaggggaaagaaaagaaaagagaagagaagagaagagaagagaaaagaaaagaaaagaaaagaaaagaaaagaaaagaaaagaaaagagaaaagagaacagtttctagcaaagatgaagaagttaccagttgaggggagatgaaggagaggaaggggcacagaaggagaaggttgaaggcacatgctcctatgaccaacaatattggttcatgtaaagggcactgacattttttagatgacttattttggttcctagtaccttgctatgtataatttttgcactagactttgctttagatagtgaaaattctctattgagacattttgtaccactgtagtatttttatattatactaagacagtctctctattttcttgataagactaacaccttaatgctcagataccacgactaatgataaattaatgctaattttactaaatttataaaattaagccttagtttaacctttctcattcttgatcaatgcttcatcattgtcattataggagaatgtttgggaaaacatgttgtgtggctgtttaaatatgttaagaaagactaataaaatgggcaagcaaaacatcacacattctttgaaacttactatgtaaatatcaggtaactatattataaagttgaatttattgctatccttaagttctatgtttataaattttatttgggatctattgtattattaagtatttttagacagtttaaagtaaactagttttggtttatttattttttaagtatctatggaaatacagatattataaatgaaaacaaaatggcttgtcattttgaaaattgttcataactaatttgcaggactgaatacaccagaagttgccatatgtcagatatcaggtcactatttgcactttttgaattgttttacctctatgcatatataaataaccactttctacatcacatataaggatcgaaggatgataggctctctctctctctctctctctctctatatatatatatatatatatatatatatatatatatatatatatatataaaacaaacaactttctacatcacattctgggagtttagcaagtgaaacgtgtaaaatgtctatctagtaatatccaccttagaggtgagcaatgggcctttactttctgatcctcattttgagtgctagtaggaaagcatcaaggggtagtggaattggcacaggagctctgtgggagaaaataaaaatcaaactaaatctatggaggtattagtagtgcccaaaggcaaggtccccagaatctcccagctcttgttttctcagccataaaatgagaatgattgttttacctcccttgtagtgcagtaatgaggattatgtaagatggtgtataaaatgagcccggcgcaaatggagaactgggaccatagcaaagagttcataaaaattagcatgttatgtattgctcagccattagagttgtctaagtagaaatgttattatagtggaccacacacaatgccatgataaagtgctagtatggtgatgaaaggttgaagagtagaccaagaacatgaggttgaaagtgacctacatatgatctgagcttccaaagcttcagcaaacagcttgttccacatttttgcttctgttatgttatagagttaggagaaaaaactcttatctgcataaccaaaatagaaatttgttctaaaattatctttgattcatcttcatacataaattgtttcgaacatttaactacatctgattggtactagggtttaatttcaattcagaagtggcatgggtttttaaacagtttgaagagttttctgtctcaatatgaaggagacagaacattcacaaatgaaaatgcacccccatgttactttatgaacaggaaatacatggtcagaaaatcctttaagcatcatcatatgtagcaattttattttccacataggaaaactgaattctagaatgatcactgttttatacaaacttacatagcaattgagaataagaactgagcagcaactcccaggacaacagtttcactacatcaccacatccctacacctctgatgtttcttatagctttttcattaccttttttgtaggtatgccagaaattggcacatgaataatttatataaataatgcatatgcataaaattagtcattgtggcttttttaagtgaaagaaattgtgcatttgtggataaacatatgaaaagggacttcatatgttcatgccatgtgggtgtctgtgtttgtgtgtgtgtctgtgtgtgtgtgtgctatatattatatgatatctaaaataatatatgatttttaaggctttttaaagtaaaggtaactcttaaaaatgtgtacttcattcctgaccctatatactttcctcggtcaagtcttcctaaactatcactttgtttgatgtgtttgcataacatctctatctgctaatacactgttcgtccagtcactagagctcagcctctgaaaactatctctgcataaatggtacctgccttgccatatttccagttgagaaattgtaatttgtattgattagtaaattttccctattcaaagatatcagaaaaccccacgagaggcagaatttcttctatattagttcaagagcactcttgagaaaggaatgtgttttcagtaagattgcactctccatctgaaaaaggatgaagaatatcctgaagcactgcttaaaatagatcgcattctctcatagaaagggaagatgcaccaggcagtgatggctcacttatttttaggtagtaggactgctgagtactttttactagctaacaacgataaaaataatctgtgtctactaaagtgtggaatctggaaagagcctgacccagtgtagagaatgtatcacctgatgtctgcttaaattaatcaatgaaactttctcttggttagggtcctacctatgaacattcaaagcatttgttttgttttgttgtgcatcatgagcacaagatggcccaactagtgtgtttgctttatttggaagacacagtcattctcaaagtgtagttctgagactagtaatgcctacaaacactgagtccttgaaacttgagaattctctgagcccattacaacttcatcgcttgcggactttgaagtgggactcagaatattaatagcttgtaaattgaattagtgtttaaaaatcacccatgtagttaactataatctatctcttttgagtgtaaagcttctctgtcccctgccctagataccattttctcaatatgagacagtttggttgctctacttcatactgtttgctacagtgcccattaatgaagtggtatatgacgatttgaatgctcaacacctttaggctcaactaacctctcctatactgtggttttacttgcccttcagagcactgccaacacacagacagttttctatcttcatgagaacctggagaactcttatccaatggaatctccccatatattcagtccacaagaatctcttaattttacaacaggttaatatttttatttttccttttctttcatattgattatgtctaatattataaccacttctttggtttcacttgtcattcctttatgctagaagatatttctatttttttcacattgattcattgttcttctgaggcagtagtctcaattattaacaactgagatgaaaaaaaactattatcatacaataataataatttatataaacatttctaaatttgaagaaactttgacttccaaatacatttgtcatttcaagaagcctttgtgattatcaaaacaaaatgggtaacactacagataccctggtcactgtcatggattccctgaaatatttagattataaaagacagcccatttatgctacacaaagagttgttagatgtaaaattttgatagttttgtggtaagaaaatctggcttctaggagtcctcatataaagcaaaatttaaataaatgttgccttttctacctattctttcaatccatgttagttttgtaattctgaaaggttgggacgctttcagaagttttgttttgtcactcgcattagcaaaggtatgaattcctagccttctgattgacctctgcaattgtcacctaccacgtttccaagtttctattctctgtcttaaacccagtgtttagcttttagtacatagagttaacaggcataaaggaaactggaattgataactccacatatagaaagcaggaatgtgatccaaggcaggcaagagatataacataaacataaggactcttttaaagagaagaaaagaggagctggagagagcctattttatttgcaattgaaagatagttgtttggtaggttagaacacagtgagaaatttgcagagaaaagcagaagaaatgtaaggtttcccagcctgggaacacataggtggacttcccagaaataagcaggcaatggagtggagttagctgcagacatgtaggtctcaggggcacctatagtttgtagcctccacagtgagtggaggtcagtgggatagggcggtaaattccaggaaatgcatttacgtgataaaccatgagagcagtcagagattgtaatactgagaagactgagtgaaggatagatctataaggaaaggaggaggtggggtaagaagaaacctcaactattttaaccaattgaaagttggaaaaatgtcacagattgaaattagcccatctttggcacctaaagcttaggggatattgcagaagaggaggaaggcagactgtaggaactagaaaactaggacatctactgtgagatattgttccccggggaaatgatggtaaggaaaatacattcacaacacctcaaaatatggctaaatgaacaatgacaatatagagacatgctaatgaggaaggggtatctcttagggtcatacacaaagaactacatgctaatcaattactgctgatcgtgggagaattagcttctcagagggatgagcctcttaattggctactcgatacaaagtggtcagcccaaaaaccataataaacataagtcacactaaaccaattaaggagctagaatttatgtatttatgcatgtacatgtgtgaaacaatcataataaaataaaaatactactctggcaagtgaatgaaacaggcatggaaggggtactggagatggtagctgcgaagggatgcaagaaggaaaaggaaagaagaaaggagcatcattccatttcaattaaataacatttttctaaatcattttaaaagaaattatcccatgtgtgtataaggagtttaatgannnnnnnnnnnnnnnnnnnnggtacttctactactactgcttcttcttcttcttcctcctggtggtgttgatgatactactactactcctcctcctcctcctactactagggcaacgccaacatcaacaccccatgatgatcatgatgatgtggttgttcttgtcctcctccacctccttcatcatcttcttctgctgctgctggtggtagtagttgctgcgcagcagcctcatcatcatcatcatcctcctgcgacgtcgtccccgtcaccaccatcatcatcatcatcatcagcaccaccatgacgaaggagatgatgttgttgttgtggtggtgctgggcgcgcaccaccatcataataatataatactactactactactactaccagccgcagccgtggcggtggtggtggtggtggtggtggtggaggtcgcgaagaagaagaagaagaagaagaagcagcatcccccccctcctcctcctccgtgttcttcctcttcatcatcatcatcacactccccccgaccatcagatgatgaagaagaaggaggaggaggaggaggaggaggaagaggaagaggaaagtgaatttcttcagggctggggtggtggtgtcttagacagttatatactttttgggcaatctgtttttaaaaatgcatttactcataatccagttttcttttaatttatttatttttattattttatttacattcaaaatgttgccccctttctgcccccccttccaggaattcttcacctcatcttcccttttcttctgagagagtgctcctatactcacccacccactgccctctcacctatctaacgtcaccatttcttggagcatcagttttctacaggattaagcacatcctttcccactgaggccagacaaggcagtctttattatatatgtagtggggatgatgtatactctttggttggtggcttagtgtctgggatctcagaggagtccggcttagttgatactgttgttatttctatggggttgcaagctccatcagtccttcccctaactcttccataggaatcattgatctcagcccaacggttggctataagaatctgcatctgtctcagtcagatgctggtaaaacctctcaaaacatagccatgctaggctcctgtctgcaagtacaacatggcatcagtaatactgtctggtttttggtgcctgctcacgggatggaccccaagttgagcaggtctctgggtgacgtttccttcagtctctgatcaatttttgtctttccatttcatttagactggaacaattctgggtcataaaagactaacgtaaatgttgggaggttttttttttttttacaattttttattagatattttattcatttacatttcaattgctatcctgaaagtcccctataacctcctcccccaccctgttccctgacccacccacttccacttcttggccctggtgttcccctgtaatgaggcatataaaggttgcaagaccaagggcctctcctcccattgatggctgactaggccatcttctgctacatatgcagctagagacatgagctatggggttactggttagttcatattgttgttccacctatagggttgcagaccccttcagctccttgggtactttctctagctcctccattgggggccctgtgttccatccaatggatgactgtgagcatccacttctgtatttgccaggtactggcatagcctcataagagatagctatatcagggtcctttcagcaaaatcttgctggcatatgcaatagtgtctgcatttggtggctgattatgggatggatccctgggtggggcagtctctggatggtctatccttttgtctcagctccaatatttgtctctgtaaatccttcaagtccttccatgggtattttgttccccattctaaggagggacgaagtatccacactttggtcttccttcttgagttccatgtgttttgcaaattgtatcttcagtattctgtttctgggctaatatccacttatcagtgagtgcatatttaatgacttcttttgtgattgggtttcctctttcaggatgacacccttcagatccctccatttgcctaggaatttcataaatccattgtttttaatagctgagtagtactccattgtgtaaatgtaccacattttctgtatccattcctctgttgagggacatttgggttctttcgagcttctggctattataaataaggctgctgtgaacatagtggagcatgtgtgcttattaccagttggaacatcttctggatatatacccagcagaggtattgctggatcttccagtagtactatgtacaaatttctgaggaaccaccagacccatcccatgggtagcagatatggggatctctgaagtatgctgcctggatatcctagcagagttaatgaaccttgggttcaaatgggaggctttacttcaatatacaaggggagaaagattgaggaagacatagaaagttcatgtctgactgctatatacacaggcacaaagatgtacactcacctcacatgtgtttacaccattggaaaacacacatgtacaaactaaatactatcatatgaaagtaaataagggagtttttcctttaaaagtagtgtaatctttactagagaaaggtattgctttttcttattccttttaatatgtatgaactggtgctgatattttctattgttcaaattgtgcagtatatatacttctcttttttaccagaccatggtaaattccttttcccaatgagctaatcattctacctacatacagtagtatgtttattccttcattctgtagtctaagattatctgtaaatttctattttgttttatagtatttattgtcatttctattgttatattagattctagtaactaggtatgaaatttgatttgataattaaaatttatattggtattatgtatttatttattagttattttgttatcttttatttacatgttatgtatgaactttggtggctgtgtgtatgctgtgctatgcatgtggatagaggtcagaagacagtttacaagaatttgttttttcttccaccatgtgggacttgggaattaaagtcaggtcatcatgtttggctgtaaatcttctgagtcatctctcttgctcagggtatgttttttttttctcaatccatttttatttattggcagagttttatttgtattttttctgaggatatatagagtttcacccttattagttattataatttaaacattatgtattaggtggtgataaaacaatagatcactcataaactttaaattatccagagacagcaaaaattggtgttgacaagaaagaaacacacacagaaaccttgtcaagaatataagcaaggtttaaaacacagtcaactcaactggtagctagactttgaggacaattgcattaatgaaaagtagcaatagcgttagaaacatttctaataaatcagtatggttcaatggctcagtgccctgattgtgttttaatcatcagtattacaagacaaaactcagttgcacagtaaacaatttaccatagaattgcactgagttatagttttcactggaatttctgtagttgaacccattgacatttgatgagtcaattttcccttagtgtaattagcctgcttagatttataaaagcacatttttcatgccccaaagataatggttttaggagagtgaaagggaaaatattcaaagaatggaaacaaaagcagtaggctagatgtacaaaggaggtacacagtgtagaaaaatagcaatattgcttacttacacaattatgcaaaacaatagtgtctgagaggacaaggtcatattaaagtggcagtaatgtttctgaaatagttcatttcagaaagaggagcaatattacagcatctaagttagctatccaaacttgtttaagcacttcatagcaaaatattgaaagtggagggtttaaagtgaaagcccatttttccatctctttatcaaatgaaaatcctgcttatccaagttaagatctttgattatattctcattaatgccagaaattttatcaggtgtagttcttttgaaagtactgatatattaaagattggaaaattgagcatttgctttttaatggagaatgttcatctgtgttgttctgtaaagctaaatatatcatcactgaagtattgtttaaagaaggttagcatatttattttcttattacatttgttgaaagttgcaaaatagaaaaaaaagaatgactattgcaaacgtgttttggaagggggaaacttcaaacataattttatgaaaagaatatatagttaaatgtcaaaggatagtctgaaattcagcgcactggtggggtttaagttattattttacaatcctcttcctaaccttcaaaagtagagaagcagcaagataaaagtcatggcactaaatttatgtattacttgcttttttgatacttaataagaaagtgctagcatactataagtactaaatgtgtgaatgataaataaattaccccaatatcagctataatactagtattctgttttggtttgaatagatacactataaacagctagatgcaatttcatatttcttctcatgaaaaaaaaggctgtctgtaatttaaattttaaattggaaactgaattcctgattgcttattgactggcaatctcaaaaagggaaaaaaaaatatcatagtattttttttcttgtttgttactttttttctttttttttctattagatattttctttatttacatttcaaatattgtcccctttcctggtttcctctttgaaaatcccctgtactctccctcctccccctgctcaacaacctacccactcccactttctggccctggcattcctctatattggggcatagaaccttcaaaggaccaagggcctctcctcccattgatgaccaactatgccatcctctgctacatatgaagctaaagctatgagacccatagctcatagctcatagttttctttggttggtggtttagtcccagggaacactgggggtacttgttagtattcttcttaaaagtcggttttgtattttgtcctctttccttttcaattaccaaaaaagtattctgattgggagcctcagatttccaaaaaagccttaggtatccaatggatctgagaagatgagagtgtcatccatgtagttaagagtattggatcatctagttgaagacttagtacttttactcatttatcctgtggtcctgtcaatggaatatgatgccattggcaaagtaattttgttctagaatagtataaaaatatatcatattatagaaacattatatataatccatctctgttataactctcagaggttgcattgtacctttaacattggatgtagtaaccgtttcctcagttcctgctctgttcttgccccagatatccgtttctttggtggatgagactgaattatgattgacactaggtcctgattcagctctaaagacagagacttccatgcatatactaaaacactgacccttcaagctgaactcactgttgtcttaaagctaagaatctcaggaaacatactgagtgaaaatggtaaacgtattttgctcacaattctgtgacttagtatactgagctcaactactcataatgttgctcactcctacaccagagtttgagtcttttgatgataagagaatgattcaaagtaaacaccagagaagataactaaacattgcaaatgactttacccaagctcagataacaagaaagattccttttagaaatgatcagttagaataatactgaaagaatttaaaaatggaaatgagtaaaactgaaatatataaagcagcatttcttaaagaggaagagcaacaattaggaaacaaagaaaaaaaataactaaatcaaaatacattctagagaacgaaagtacttttttcactgattttaagactatggatataaggtccattttaaattatgtttgaaaagaagaaattgtcaaattattaatgtggataaaagttgccatatagatatcagaaaagaaaactgtatccatctaggaagttgagtgacagaacacactaatttaggtgaggattcaaatatcagtggagatgacacactgcagtccgtgaggtgaaaaaccagggaagggatattttgagagttggagcattactcattctttatcttgttattgtctcatggtaaaattataggaagattacaaatttttggtcatttgatataaaagttcaggagaataaatataacaaaaggtattatgaattaagttagaattagtagagatgaaaaaatagagatggaggaaaagtataacctgaaaagaaaatttaattggtatgaatgttgactagctattgaattatgaatgctttaaggtgtgtttctccaggttagtattatcttccaggaaccatgtgttataattttttcccaccccaaggccagtacctcacttgagcacaaacacacatacatgcacacactcaaacacatatatacacatacactcacaaatatgaacatacctacacatacacacacaaatattaacatacctgcacatacacaacacatcatatcacacacacatgcttatacacacatgcaatgagagacagagacagagtgatacacacacacacacacacacacacacacacacacacacagacagacagacagacagacagacagacaattgggaaaagtggaaggggaaaggaacgggggaggaagataatattagtttttgatgacccttattcaaaaagtctcaattttttccttcttcttcttcttttatttatttatttttttaaagaatgagttttggaacatgctgtgataacaaccaactcaagtatagtgatacttagttataaaataccaaaagaaatcaccttatgactataaaattatcagcaggatccaaactcattttcaactaaatatttgtaattttatctaataaaaaagaaaatggaagattttaaaatgtaccctaaattcttaataattctctaggcatttttttctgataaaatattctttcttacatatatgtgtaaaatgtggcatgtgctttagggttcagttgcaggatgatggctgtattttgcatgttctttcagatataggaaagaagttaggtggagagagaagaatttcaagagacaaaacataagatacaaaaaagattttgtacttaaaatattttcatgcacttgaatatgtacaatatagttttttaacaagaagaatgccatttttctgtttttgaagactaatcttgttctgatgacttgataccaaaaatactttactaaatttctgatgaccaaaatctctccagatatatccagatgcctacctgtcctgtttcattctttaactcatggtgaactatttaatatggtgagtataaaataaagacctgtaacagattataaagtattattgtcaggttcacttgagaaaaatctcagttatacttattacactttcttcttattttccccgagtctcccttttcaaaatcctctctcactataagatacagtctgtgatcattctctgttgatcatctatctcaaatctgcacattaaaaataccgtttgtacacataagtggatgctcacagtcagctattggatggatcacagggtccccaatggagaagctaaagaaaatacccaaggagctaaagggatctgcaaccctataggtggaacaacattatgaactaaccagtaccccggagctcttgactttagctacatatgtatcaaaagatggcccagtcggccatcactggaaagagaggcccattggacttgcaaactttatatgccccggtacaggggaacgccagggccaaaaaatgggagtgggtggttagtggagtggggggggggggagggtatgggggacttttgggatagcattggaaatgtaaatgaggaaaatacctcataattttttttaaaaaaggaaacaagatacctatctgaaaaagaaataaatgctgttttaatctaaaataaaaaaaaaaatacgtttgtagaacaatgaggatagagcttggccttttctggtttttacttttcattaggtcaagcaggtatctattctattagctttaggtcagcagcattagttttgggttgcccttattctaaatgtctaaatatccttctgcctttgtgtaagaagaatgtgacttgcgttatagaaataaaccaattcagtttatatctctcaatagtgttgtataataccttatctttatttaattcattgtgacacatgaaaataatgtgtttagattagttctgttctctaccttcccactcttaactccatctagctacttatacacatctttctcccaaattaacattgttgatgtcttcatcataatcaccaacattttatgttggatagcatatcattagatatactgctgaagaaaagtgtcctttccttccccattagttccacagttagatatgcaacctaatcctaatgagtagatcccctattcattctgaaacattgactgttttgatttcctatacttttcaggaaggcaaccacagaagccaagacttcatgccttaccaatttaaatgcataaagcaggtgaattcgtgtttacaatgcatatttcaaaccacaccttttgctatggcaattaaaaatgtgtgttttttaatgttctcggacctattcatgtgcagcgtacttatttgaagatattgctatagcttcaagtacccaataacagtcatgctttggagcattggttaactagatgcggtagatgtctaatgtgtattgggcaacaaagtagggcactgcatctacacaggtgaaaattataactaattctctagagaattttctctttaaaacaaaggagacagccatgaaaacacggattcataatacaatatgactttgtccttaagaaaggctaagtgagaagtgcttttgaaagaattaagatttctacttatagagagtaaaggaccaaaatagaagacttgtcatgcataaacataaatgttcttatactttttgactttttctgcacatgagggttaaaatgccatataaatctccacaatgagcccaagagcatataataaagatgaatgcagccacattcaaggatcaattagtatgtatagctaatcccctttcaagattgtgttttcaggaagggcaccagacttaagatacaaagaatttcaaaactgtagaggcaagggtctctgccaaagtttacaaaaatcttcttgttggagcacacatttctgtaagaattaaaaaatgactgaaatgttctaaaaataacagctaccagtctcacaaaatagcctggccctatgtttcagacacaccatatcagtgctcaggcctatcatgtttagtcttcatttgttagaaaggctctggctaagcgaatagtcactaactctacacaggtatctcctggtcctttatcccactaggacagggctttattttttgttcattttatttttcttattttgcccatatttttccaattcaaacaacaggcagattttaagaagcatggtgtttttttatttgcttttctgcaagaagtagtaaaataatatttttttaaaaaaataaatgaaaataagaatgcaaacagggattctgtgttctgtctttagatttgactactccatcccatatcattcagacataacttataaacagaaagcatacacactgaattatattggtggaggtataaaggaagattttgttatctgtctacccattttcaaacctgataatgtatgatttttttttggattatttttgaagtatagtatcttaaaatatatacaatccttatgatgattaattctgaaaattaattaaaagtacttcttctaaataaggtttgttaatatattattgaacactgaatcttcagttgttcaggaaactgaattcttatatttacagataaatcctagacaaaaggcttaaatccacacaactaaaagttttaaggttgaaaccagaaatcaaatactgctgattctagatgttttctttactttgcctaagatatgtcggtgatgttacatttgaattcctccctcttattatagaagccttatgataacacattttaggttcactggtgcttcacgagctcttctacacagttaaggtctcttccgtctgagagagcttttgtttgtgcatctgtttgtttcagaaacaagcagattatgaaaatttccaggatcctttccactgtcatcggcttcgctgattgaaaggagcaaaataagataccttgaatgaaaatgagactgtgcaaagttgatgtgtgtatttgttcactctttcacactgacttttttccatatatatttttaattttattatcttccttgctcacacacaaacttaggggagagacattttatatatccgtatgctgtattgtacgcgtcaaattttacaatattttattttgaactgtgatgacaatatttctgtgatcttttgccaagagggctcttttcattagactccttacctcaactttggtggattcactcttcgatatcttgaactaagggaaaagagtgtttgcaaccagtctaatatgcctacctagagattacatcatattttctggacaatactacatctgtctcaagaagatacatatatgttttttggcaagtgttaacactcctacagctctctgtatatttccacactcaaagtagctaattataggaacctgggaggaagatgtgcaaataacttgcaaaagtgaggcgcagcgccttcatttcactatgcatttcctattagcatgggaacacagcagaagtggagaggaagatgatgatataggtcaagaatgccatccaggtctacattcccctggaccagtagttctcacccactttcaaaggtgtctaagaacttctatatttataccagcattccagattagtatggagggacatttttcaaaataggagacttgaactcattttatttcacagttggttagcttgatttattttaaaactctacccatatggtgttctggtctgcatttgtactattgtttcaggatccaaaattcttatgagaagaccaaattgttctcttcccttacatcatactttacctctagatgtactcagaaataaactttctgagaatcccaagtcatatgggcagctatttagtcagcattgttatcgagggtcagtatctaattttattccctttttttcttttcttttttagttttaagacatcatcacattatgcatgcagccatggcttgtctagaactaactatgtagaccaggttggcctcaaagtcatagagttccatctgcctttgcctctgcctctctagttctggaattaaaggtatgtaccaccacacacagctcattttgttttatttaggactgtactcctttatcctacagggtcaattattccgaacctctccagttcggcatggttctatttgctgtcatgttatttccttaacagaaagtaaataaacaagtaaataaggtcacaccctaggatatataaagatttataaatcactgccttgaaactgatagaagagaatcagataaactttatactttacaggggtatttttttttccctctaaagctaagaagcaacaaagatatttcctgcatacatcacacacatttctccttacatacatatgcataggcttcaactctacacattgctttgtcagcacgttgtggaactactgtatcagagtagccaaactctataaatttagacatagacatgtacaaaaataatctaacaaatgacagcagcttgccttcattaagcatttataatgtgccagctgtgtttgaagccaactacgtgcattgtaacacttgattatctttgttagtataacagcccaatgattctgaagatccattaagcaaataggtaactgaggcattagcattcatttttctcaagtcatataagtaatgtgtagcaatatgtttactgtcaaaccatcagctaatccacccacatatatttactgccaacttatcctgttatgtatttattctgggctaggtgatcctaattagttgtagaaatagataacaaaataatcatttctggaatttcttgtgtgaaaagcatcaagcttttttcttttcttactgtgtttttataaatctgaagattatcattgaatttcatgtgggaaatagaggtttggaagattttttgtgcaaagtcaaatctggaactgggtcagaaaaagtaaaaactattgcataagactgggacaaggctaagcatgagccttggaaccagtataggcactaatccttaagtatgaatatgcctacaagataaagtgtgttgtacatggtcagagaatttttttaaaaaaacagggaccaatgaggttaaattaaaaggagactgagaaaatacatggaagaagatagaggacagatgtggaacaggcattttaggatgcggagaacatgtagttctcactgttccttgtggcatctgaatggtaaagaaatggagataacacgccggacggatgccatcatctgaaagtggaaaagtagttgccagtcccatggcttgcatccaaaaatctaacaaatttaaatttaagtgaatggatatgctctactggatgactggattttataatgataattccaacacaaatagttttgcacagtgaaaaaaaaagagagtaaaccatgttccataaacaatgacatctgagcatctgcaaaggcatgctttgacttcaaacatagaaggcagttccatttaatttctttttttccctttcttcattttaatataccagagataaggacacagtgccttaatctggtatgtttgatatccacaatagcttacagtacacaggaaaatctacttaagtcgttgatggcttagaggatgagagaggatgtgtttttagagcagatgttatagagaaaaaggatcataccctgtagagatgaagtggaaatcacaaatatatacatgacataaatctagtatgagggattagtagcaacttcgtgtcctggacaaaaatgcagtttcctccataaacagtcatatttgtcaggtattttccacagtgtttaaatagcagtcattttacaggttatacggattaaagtccttcaagtgggagaggagctgcattatttccgatgcctggaaagaccacacagtcggtcctctgcgaggtagcccggaagcccttgctccatcaagcatagcctattatatacataaagacacacacatatatatacatatatatacacacacataccatatatatatatatatatatatatatatgcacacaatatatatatatgcacacacatatacacatcaaataaataaactttcccttagacatgattaattccttaattgaagtgactagttctcatcaataagaagtatatctcatctaattttaatttgcaaacattgttttttattgagcataaaactatattccacataaaacctggaaactgcatcactgcatagaaaatattcagagtcatgttgttcaggcattgcactactttggaacatgctcttttaatatttatatgatagatatgtgagtatatttatttatagtgttaatatatcaatgtacagatatatttcagtttgtatatccgttcatacacactgttgctatttctatttatatgtacatggttttaaactattaattatacaaactgttagaatagtttgatttttttccactgaacaattgtatcctgtgtctataaatattccttaacaaatgagtttaatggtgtttagtagtttgctgtgtggatttactttaattcgtttaatttgtctattttttcatgttgataaaatattgtgaatatttggtttctaaattgctttattaccacacatagaatgacaaacagaagtctggaattgttttgttttgttttgttttgttttgttttgttttttgtttagagacagggtttctctgtgtagtcctggctgtcctggaacttactctgtagaccaggctagccttgaactaagaaattcacctgcctctgccttcctagtgctgggattaaaggcacgtgccaccactgcctggttggaagtctgtttatatagaattctcagagagaaactgttgacctcacaatgatcgctttatactggcattgtgctaaaagttctatgaacaatttaacatatagtacttacccagttagagagtcaagaaagttatatttttcagtcatagaaaaagacttattcgagacttactagagtgccttacaggctgtgttctgcctatgccagccatgcctgtcaccagccaaaaggtaaagaattcaatagttctttgtcctatcagactgaatgcctcagttaatctgtgtaggcaagaattccaaagaagtaggaactgatgtcagagaaggaatgggtatgtcagtgatagtgagggctaggaggcaaagagaagaagctatttcacctcatgtcctttataaagggtgtcaccagaagatgaggtccaggctcaggatgggtcttctctcctcagatatttcaatatggaatagtctcacaaatgcacttggcttttgtaaagttgataaccaggaatatctatcatagcgaggattattaaatagaattaattacaggaaaatgaattgataatgtttccccaaatcccttcattgaaggaatactatttgaaacagaccttaacatggtttggatgtataggaggattttacaagaaaatgaacaggaacgaaatgtactggtctgaacaaagacataaagtattcttaggcctgagactcatccattctatcggttttacaaactaccatatgccagagctaccgtctgatcaggttagagcacaggagagttcttgtgtcttatctaactctctgagaaaaaactattaacccagtgttcttattgcttctaagtgatgttacattatttttctaggccagtaactgcatgtcaaacttcattatagaatcatgagaatggagaccattataaagaatcatgaagcttatcttactttgtggaaatagaaagggcgtcctatctgaaacacctgaattccatttgggccacttatcagtcctttgcttaagtcacttaaccttgttaaatcaatgtgtccatagctctaaaagagaacaattataattatgtcaaactgctgttgggagaattaaaagagatagcatttgtgcaaacatgtgtcttactgcctgatgttcaacagacacccaatatgccttgctgcacctcattgtccagtacatttgcagccttcttttttcttttagaagttctctgaaatcacgacaaaaaagtgatcactaagactttttttcacgcctcaaagggaagttagcattttttatattattataagtctttgacatctttctttgacccacaggcacaatgactataaaattatgacaaaattaacttcacttaaattttatttatttagttaatatgttacataataggatattcctcaatagatgcatcttaattgagttattttgcacattttgttaaaaatatgaattctttcaaaattacaactaacactgctgattacaaaagaaatctgaagaactatagtaaacctcaaacaaacagatggctaattaacatggcttaagaatctgtttttggccgggcgtagtggcacatgcctttaattccagcactctggaggcataggcaggtgggtttctgagttcaaggccatcctggtctacaaagtgagttccaggacagccagggctatacagagaaaccctgtctcgaacccctcccctgccaaaaaaaaaaaaatctgtttttgtcttcagaaagatatataatacctttgctaattgtagattcagaattgtgtgacaggctgtaatttatgcttctcatctgatttcctcttaaagaaagtaggctcctttgcatgaggtagtctatacatcttaaatagtaactttatttcattgtaggagctactaaagatatattagcaataaaagagggaaaaaatgatgtacccagatgtgtaacaaaaggatttagggtgtggctctgtggtaggttgtatgcatatccagcaagtatgaaaagtaacataccaaaattctccttgattggttccattacaacacaaagaatgtgcatccctacttagcacacaatgaatgtgcttactgacaagcaaaattaggaatttttttaagtcatatatccaacctatttctaatattgcattttagattgattaatcttctacattgatatgataaactctatttagttagtacatattatttaacgtctaatgaatcagatttataattataaatgtaatttttaaagactaagaattcaaaacgctggacagtttggagagagtatgagagacttatagaaaagctcagtctttgcagtttattgtaggataaaggtaaagtgtgtaaggaaaaggaaaactaggagactacatttgcatatctcacatggaagtctctgaagtggtttgtgggtagctacaatcattccccaacttcctcctataaagtgtttaaaagcatattgagaacaaatccaatgtaacattaatgaaaggaaaaaaatatatgtattaaataaaaaagaggtaatatgtggtggggaaggtatatatatatatatatatatatatatatatatatatatatatatacacacacacatatatacacacacatatatataaatatatataatttgctaaatcatttcctaccaatgttcctttaaaataaacaaaacagtatttgacatttcatagaacatattttttcattactgttgattttattaaaataccttttaatagcctagtatgaaaaccctcagtgctccctgctatagtttttttaaatttatattccaaacattgcccagtcatattttaaaaaataaaatgctttcaaaatggcaggaaaaaaaaatcaaagcttcttagttcatagagattgggctttcctttatctctatggtcaaaaagttttacaaccaagcaaaggctttccatacacaccatatttttgtgagacttgagaaactgtttttgctgtaaggtggtgtgtctgttcagggcatataaaaagtagatgtcaagacaaaattatatttataagaaatctatcaagggataaagcctctaaagagccatgcaggaaggaaaaaggaaaacagtgggagatttgtttgctcagaatgcagatctggcatctgtgaaaacagagcagggagaaagcaagaacttccactgctgtgctggagggagaattccagccagctctggggcagcccacaagagagagaaccttggagaacattagtgacaatgcttttagatggaatgaagaccctctcctattctgattaatgaagccgctctcttactctcttcgagttcaatgattggatggaaaaattcatgagctcttgtgacttggaaatggaatcagcagaagatacaaaaactgctgccttggttaatgatcagtgtgctggagattgactctcagtgtttctttgaaggaagatctgagtagtgtatgttgtagcagccacagtctaatactcatagtgcatggcacagttctgtaactcagaataaattaataagtacatgacctttatagtttctgcagttgtcatctcaaggcaaatagtctgataacttttaactttttctgacacttggaacacctcctggctacaggggttggtgacttaccaaacattttttctgaatgttaggaatatctagaaatcaaaacattttcatctatatttgcagtatatatattaagttgtacttaaggtaaggaataagtagaactacaaggtatatcacttaggtgccacaaagagtcctctgttcctgtagtatattaacagcagagtttattttgcaccatggacaaatgaggtataccaaaacgattcttgcctacataagaagcctaagtacttgatggcagttgatattatatttaaattttcttatttatttacatcccaaatattgcctaacttctagtgtccccttcacagagtttctcccccattcccctccccttttgcctctgagagggaagctctccaacaccctgcttcagatatgtccccacactggctcatcaagtctctaaaggattaggcacatcctctgaaactgaggccagacatggcagccctctgctatgtatgtgccagggcttcaggctagcccatgtgtgctctttcattggtggctcagtctttaggagctctcagaggtcctggttgatagacaatgattgtcttcctgtggggttactaacttcttgaaggtgttcaatccttcccctaattcttccatagcagtcctcaacctctgtcaagtattgtctgtaggtatatgcatctctcttagtcagcctctgcataggaccactcagatagatgctatgctaggctcctggctgaaagcacaacatagcatcatttatttttctgtgggcatctgcacatatctcagtcaacagctgatatatttactgggatcttgctgtggtccccaggaaaaggttttctttttttttttatagtacattgaatatatctttgaaaatacaagtttacaacactaccagaatgggctatacaaaggagaatttgtcaaataagtcaaacagaaagccacagcatttttccaagtgtcatagtaaaatgtattattgggtctaacatagttggtatctagtacaagtttcctcatcactatattgtctacaaacatgggcagccatgtagagaacttcttaggagtttagcattacgccttgaagtatagttttgatgacaaaagtgaattacagcttgcatggcctcctagagataaaaagtagccttctgagcatcatttaaatttatttaataaggaccgttgcggcattctcatccttatgttctattttatccgttgcttttctactttgcaaggtgtgacaatttatatttggtctggcctgcaaggagttgccctcaaaccaatgtgcccatttctctggttatccctaggatattataagtaatatccttaggaagtattctcaagtaggaatatctaaccatgcattctaaatccattcgcttagtgtccatggaaatatcaatgtaggggttttgttctgtctctagattatatacactaggtaagtactaaagcatagttaaagaaaatacagttgcgaattcatggattagttatcaggattagcacaaacctctgataattcaccttgaggtgtaagcctagttactggactggaagatgaggcagcaaacagttcctgctcctgatacccatggccttaaggatactgggatctctaccttattttcctgcccagtgaaagtaattgggagaaggtcttcttgggaccagtggatgttactttcaagcaaagagggtttcagattagagtataagtctaaactcccaaaggacttcttgactatggcttctcattccatgcttcagagtttagtatttttctatgtaatatttactattgttaactgttctaagcagaaagcatgttttatttaaataatgcctttatgtagctgacaatttaactcttattgtctgaccataactttgacttcagatttctttatcacaggttggtttctaaaatggcaaaatgaaaaaaaaaattttagcaaaaaaaaaaaaaattagaatgtattagtacaaaggtctctgccagatgacaacatttagattttgctttttattactaactgttacacttcacatcacttatatatgtcattatgcttcaggtactcagggactctgtactctgctgaggaggcccactactttcttttattcttcactagatggtatatctcagactattcatggttttctcttaaggaaagggcttaaaccattttttttccaggaaatattcttcttgtagtttgaataagatgcccccttcctcaataagtcttaggtatttgggtacttggttactagatgattaaaggctgggaagagtgagatgtggtcttgttggaagatgtttatgactgtggaagggatggagaaaccttctgttatccccagtgcataatttgcatctggctagtgggtctgattagtgaggtctcagttgtttctgccactatgcctttatgctgtcttaatggaaatttaccctctgaaagtataaacctaattaaatgtcttattttataatttatcttggtaacttttagcacagtaataaaaagtaattaatacagttctattccattttaagtcgcttcacattcactggatcttcaaactgtatcttcttatgtaccttatcagaacagtttttgagcaagaaaaataattttttggtgttttcagaagctaagatcaaaatgggatttcagatacctggacaaacgtatacaagataaagatttcaagtcactaaccgaatttgacttggtacagagaatacctataaaatagaaagaatctcagaaagaatgctgcactaaaagcccacagttagacatatggtaaccatggtatagaaatggcctgctagaaaaggtgggaattggatacaagtggtgtagttctgatactcacacattgttgagtcattggcttaaatatgacctggaagtgtcagtgagaacacagtagctgatctaaaggtgacatctctcaggtagggtttctcttataggaaagtctcagttattcactttcaggaaattcaacacactgggataataaaaggaaatattcattataatgtaagatagatgagattcaaatcaccttacctagatctggaatgccaatgtttcttgatacatacagaactgtgtttctttccttataatacaaatataacttcatcctgtattttaaagtcttggtagaaaatatgcagaagatctcagcatggtggctgggtatagcaagttgttcttagtgtcatttaacccctaccctttgcttaaattcttctggatttcagtcaatcataatttatttgtatttcaatgtaggtataaatttggtacacacaaaatataaattcaggaaaaatatgataggtacactttatgctgttaccacttagaagacttagtttattctaataaaaatgagatcaataagcctaaaaatttgaggttttaatatatagtgttccaagtttttatttatttatcatttgtactaaattagctcttattaattgatcactttgtctctgaactaagaagttattttaatcacccaagggaaactttttgactctgtgtgtgtgtgtgtgtgtgtgtgtgtgtgtgtgtgtctgtttatatgtttgagtgtatattacaatattatatgtatctgccaagcaccagaggccaatattttattgggtttggcatatgtgttggcttgtgtaaacaccctcatctcaatattgcctgtaaagaaggttagtccagaagagaacttagcaaattgatattattcttagtatattcttggtaacataatggggttacaacccgtgcggtttcctagagatgatgaaaaattatatgaagcactatataaacttacctagtaatttctattccagtatttctgccacaatattctattattattattgcttttttttttctattttgcacgatatggccatgttttggaactgtgatttgaaaggctaacatcccagtgagtttacttactctccttggctcttcacaggatattaaaaccacatgtatattgagcatatgtttttgtataagctactaaattatgatattcacatagcatatttatagactctgagttttagctacgttagaactatcttcttagtttcttggatcacagaattcaattacttttacaaaacatatggaaattatttgtgacttcaaagtcactgttttatttttattggaaaaggaatttgaaatttgagaaagaaataagactatattttctttaggggcttttactatgtaaaacatagacatatacttagttggttagattagtggtctcacctagctttcatgttggtgcaaataggaatcattgagtgtggatttgaaactgaaatcttcactgagatatagtaggaatgatcaagataatgtgttttatgcaaaaggaaatgtttcaaaaacttgttctctatctcttgatatacagtggtttttgtgtacaattactccagtaatttttgtctctaggtgagaagtaattaattcatgaatgctgagaatattgtaaagcttatatctaaagattttcacagaggataactctttaaacataccttaggatttcaaaaatagtaccttaatataggctttcaattaaatatctgattcaatttatattattttcctaagacattaccatgatactcaggaaaaaaaaatattatattgaaggatatcaattttaggaaagtgttttatatttgaacagatttttaatttaattgggtaatttcttcatttacatttcaaattctatcccaaaagtcccccttaccccccccccacttccctactcacctactcccacttcttggccctggtgttcccctgtactgaggcatataaagtttgcaagactaagggcctctcttcccaatgatgtcctactaggccatcttctgatacatatacaggtagagacacgagctctggggggtactggtgagttcatattgttgttccacctatagggttgcagatccctttagctccttgggtactttctctagctcctccattggggaccctgaacagatgtttttatttgaagcattggctcttctttatcaatccattttaatactcatgctcattgaagctaagtatatacactagcttagttaatgaagacagtgggccaagattgacaatacagatgcaggaatatatataatcatgccaaaatcactcaaaccaaaatatgcaagtaagagataggttttttttggggggggataggggatagtagaacacatccttactgaactgcatagtctctgtcttgaaatgtgttttctagacctggcaaaaagtagacattaaaagtgcttagtttggattttataaaaacagtatatcagaagtgttcatgaagccataaagtaagttcaagtccaaattaagcaagcattccatgaactgatgggagaaaggatcaacaatatctgctaaattatggagtctctagaatagtaaagtaagtgtggtaaaaggtttaagactgtgtgacattcaaatataatttgatattttctggatcatttagcccattaaattcttactttcaatagtcataggccttttactttgcatccctttctgtttgaatccgtaaaccattattttttaacaacaatggcaatgttaattataatatttgtgttcaaaggcacagatccttctaggagtgattcaagtatataaactgaattacttttacaatgggccaggattaatcgtcattatgttaccccagtattttctttgaacttaattattagtaatttggatcaatttttaacttaaaaaaaacaataatttattacacacatcttcctggctcattaatctctttactactgccacttaggataaaatggctcatcaaacaatagtgatttaatcataaatatatgaagtagaatagcattcacattgaaggctcaacagactcaaaacattttcctcttctcagcattctttatcttcacatatatcatggcgggagattttcccacttcattaaataataattatccactaacaagtattttatttttcccacacacatatacttacagacctgcaaattcttatgtattaataagagagaaattcacatttcttatctttagaatcagatgcttacagtcactcctacttcagaaagtgaaatcacaaatcattattatgatacaatattttatatgactaaatattgatgagaaatgaattttttcttcatctctaaaatatttttctggatttctcttatagaaatattttatgtgacagatactgtctttggtaccattgaaatagaatgtgggagaatttcactattgcctatcaaactttatttctagtattctcacaagagactcatggaaaccaaatgccttattcacaatttaaaataaaaggtgggaaatacattggtaactagggttgcctctaaggcaactttatttttcaccatacatctgcatttcttttatttaaacatttctctaactccttttcagcctaatttatttctcccactgaagctgagatgagaataagggactgttttgttgtaaaggtattaaaaatggaaaattttttgattcaatcaatattgaattaatggcaatatacaaatcattccagttatctcaaagtagcaccataattcagctttcttgtgtttcattgactgtttttataaatgagaaaatggagtctcacagatttcagcaacatatcagagcagatttgatattacaactaacaagatgagacaggaaattacattccaccctggcatttttttactctcaactatgttcatttattaatcttatattcaaataaattctccctaaggtgcaacatggttttacatgttatttttagagcaacttcattttttgattatttgtcttttggaattagccattgactttgaacactaaaagtggatgtcactcctgtgtgagctgtctattgtgatttctctttggctctgcttatacttttcagttttatggcagtgtttcagccctagagagagccagaactgtctggtggttcaaacaccaaccccagtgacagggcaagtccatgatttaccatctgcagccctcacagcaacaggaggatcagttggactgtgagcctatggagacatgtacaaaacctattttcacacatgatttacaacacttggagcagacaactgatagtttctctgaggccgcagactagatgattttagatcagtgaaggatggtgtctcgcaatctatttctatagctaactctctctatgtgctgtctccaggtttatagactcagcgagggaaatattgccagcttcagaataaacagaagttagtaagaaagatagacccatatgtctctcataaattaaatgttaggattacatatcccaataggataaatgtgtcaaaaaagcatcagatattacttgtgtgaaataacatttcttgttatatattaaatatgccagactgggaacttttctttaacttttaatttctgttttattgatatttttcagaagcatcatagcataacatctacttaatgtgtagataataaggcaggggcataaatgacatttctattttagaaattggtgtaaggtttctaagaatgggaaagaaataataattttcaacctccttgtcatagctgacattgccctccttgatcacaaaacatatgaaaatgaacaaatatcaacattttaagacttgattccttattgttataatcattttatacagacttgtatttacttgtaggatcaaacaatatatcacttttttatcttgcaattttctgcagaagagagaaatggttcatgtatttcttgaaaggtgccaggaatcctggtactttattctttataaagttccttgaagacgtctatatatgagtattaacagaaattctcaaaatgaggatacttgtacaaataagataataaacattttttctcttctggtctttgaataaaatataaaaaatcacaaattaacacttgcattggcatatgttactgatgaaaagatctatgataaaatttcagggtgtaattttatctcaaatacatgtattaaaatgctacttatatgcagcaaacaataggtttaaaacaatgaaaaatgtacattatctcaaaggtaaggtgacaaatatatcttctttcattaaagataactatcttctggacttgaatataggctattgattaacctgagatatcttaatatagaacatagtctttgtctattacattttcttttgcctgttggtctgtatcctgaatgacctccctacccagatacttcagtttgttcttataaaatattgccaaaatacctaaggcctttgcctgttctactttactatagaagagatgatatttttcatttttctctccactgtttcccttctttctctgaattggtaaattttccatataatttcctaggtatatttatattgttatgttatgagaatattaatctatgtttactaaggagcatatggcataaaattgtgtgtgtgtgtgtgtgtgtgtgtgtgtgtgtttgtaaatgacaaagatattagaaaacaatttggcaagactaacattgatgaattaaaagtttcccaattctcgattccagggtaaatctggtctgatatagcgaatatctcaacatacgtagataaatcttcatgtatttgatacaggcactatgctactttattttaatatacattataaaatgccattttaataaagtttaaaagccaacttttaggaaataaattatatgactttgtacaaatatatttgtaatgaattttactgatataataggtacatatcaataactttcaaataacttcttagttagggttttactctttggaacagatgtcattaccaaggcaactcatttaacaacatttaaattggggctggcttacaggttcagtggttcagtccattttcatcaaggtagggatatgaccgcacccaggcaaggatcttgtaggaagatctgaaaattctacatcttgttctgaggcaaacaggaaaagactgacctctagttagctagaatgagggtttttcttttcttttcttttcttttctttttaaaagatattttataggtggaacaacaatatgaactaaccagtacccgggagctcttgtctttagctgcatatgtatcaaaagatggcctagtcggccatcactgcaaagagaggcccattggacttgcaaactttatatgccccagtacaggggaacgccagggccaaaaagggggagtgggtgggtaggggattgggggggtgggtatgggggacctttgggatagcattgaaaatgtaaatgaggaaaatacctaataaaaaaaaagaatttttcctccttggttgggtttattccaaaatattttattttcttaaaggctaaaatatttacttgtaagtcaccttaccctcctctgttttgattatttcaagaaattacattttcttttatgatgttgtaaatgtgagtgtatcgacaatctacgttcacagatatttttgttggtgttagaaaagctttggatttgtgtaatttcattcaaataaaaaataaaaaaagatattttatttatttaaatttcaaatgttagcccctttcctccttttccctctgaactccccccttcccattccccccccctgccctgctcaccaaccgacccacttccatttccctgtcctccattcccctacaatggagcatcaagccttcataggactaaaggtctcttctctcattgatgtttgacaaagctgtcctctgttacatatgcagctggagccatggttccctccgggtgtactttttgtttggtggatcagttcccgggagttctggggatactggttggttcatattgttgttcctcttatgcagctgcaaaccccttctgctccttggttactttctctagctccttcactggggaccctgtgctccatcaaatgaatggctatgagcacacacttctgtatctgtcaggcactggcaaagcctctcaggagacagccatatcagactccttccagcaagcatttgtttacatccacaatagtgtctgggtttagtgactgtatatgagatggatccccaggtggtgcagtctctggatggcctttccttcagtgtctgctccatactttgtctctgtatttcctccggtgaatattttgttctcccttctgagaaggacagaagtatacacacttttgtcttcttcttcttcttcatatggtctataatttctttaaacacacatacatttttacttcccctctatatatttctcatgtgtaatttctattgctaagatttctagtaatatgggggataagttctctaaataaagttacttctcattttttagaccttatatgttaaaaaaaatgtattgatcttatacttcaaaaagcagctcaatttcagtgatagaatcagaaatttggcctccaaagccacttgggaacaaattcaaactctactagcagtctctgggactcaattaaatcacctgattatccatcactttcatcttgctcaaagtggtcacataagaactaatttatgcatttggaaaatgtgttatgaattttgttgtgattctacaaagcatacagggagcatgaggatgtacagaaagagaaaaagtgatttaaaaaataaactcatattgcttatgataaatgatgaaaatgaaaagtggatgttagacataaatagggaagagtgctacaaagattaagcaaataaattaactaatttaaaacatcaaatggagaatgtctgtcaggtgtataataagtggccattatatacgactttttgtgttcatttacaagatttaacatgaaatcatggtgtttatcattatgaaatgttagtcaaagcagaaaatcgttgatattattcatctgtcttgtttaacatgagtagctaaagttcaaaaaagattaaacactcaatttcagattacagtttctattttcattctttaatgtttctgtcttatcttatacatttttatgttgaccattaaaccatcaatcctgcaatgcacatttggaaccagataactcatctgaattttgatacaaatattaaagcttaatttgagcaggaatgaaagcaggaattcagagactgagccattttgaagggaaatgttaagggaagagtgctaaaactccaataggctagtagaccaacaacacaaggttctaggacagtggaaattcccttctttgagtaaaacataatttatataatgtatcagttaaaactctaaaagattgggtagctatttgagcatatattagtcttgcccttttcatgataaattttctctagtttcagttgcatgtgaccaagtctgttctgaaaccattaagttaaaatttctgaaagaaactatttcatgtctcttaagccacaggctataaacaattagcatgatgaaatctgccctgaaattcagtttgccaaagccatgattcatctctttgtgcaacatgtccttagtgtataggctacactcttggatttcaaatcaactgtgacagtactgtggtgcatgcatttaagtatttttccttaggaatagctctgagagcaaggccagtgatgttggaaacatgactatgtcaagaaaaaagtctgtatttattttaagtgaaaaagataagagttctcaaattaatcagaaagaaatggcatccctgtatcagtccagccagagcaaagtcaaacagttctctgagggggcagtgaagataattataagacagacagaaaagaatactcagagacaaaggacaaaattctggaggcctacccaattagtattgtagcagcctctagtttaattatcttaaggtttgtatactttacagcagagtgggaaacaacctcacaagctagtagaaacaatggctgacataccttcaaaatctgtacccatctcgaggcctcccaattcttccttgttgcttcctccaagattcacaaacatcagccccttgccttgatcttcacatgtatcccctcatattagtccatgcttcagcagaccaggtactctgccagcaagccttgacctaacttgcctctctttctacctatcaggcaggttttcacacaagtagacaaaaaaaaaaaaaaaaaagctgtaacaaatgtgctcagaactgggtaggtgaatgaattatcaacacatgaaattataaagaaaatgtcaattcatgggaaattttctatgcacatcatggtaaattgttttctatttgttttttttaattagatattttctttatttacatttcaaatattatccccactccacatttaccctccaaaaaccccctatacactaccacccccccccctgctcaacaagtctcccactcccatttccctgtcctggaatctgcctatactgttgcatcaggccttcacaggaccaagggccttaccttccattgatacccaacaaggccatcctctgctacatatcaagctgctgccatgggtccctccatgtgtactctttggttggtagtttagcacctgggagctctggggtactggttggttcatttttgttcctcctattggggttgcaaatctcttcagctccttgggttctttctctagctcctccattaggaaccctgggctttgtccaatggatggctgtgagcatccacctctgtgtttgtcaggcactggcagagcttctcaggagacagctatattaggctcctgccagcaattacttgttggaatccaaaatagtgtttgagtttggtaactgcatatgggattgatccctaggtggggcaatctctggatggcctgtccttctatctttgctccacactttgtctctgtatcttctcccatgtgtatctctgtatctttccaatgctcatggattggagggttaatatagtcaaaatggccatcttgctgaaatcaatctacaggttcagtgcaatccccatcaaaattccaattcaattcttcatagagttagaaagaacaatttgcaaattcatctggaataacaaacaaaccaggatagcgaaaactattctcaacaataaaagaacttctggtagaatcaccatcctggacctcaagctgtactacagagcagtagtgataaaaactgcatggtattggttcaatgacaggcagatagttcaatggaatataactgaagacccagaaatgaacttacacacatatggtcatttgatctttgacaaaggacttaaaccctccagtttcggaaaaaagacagcatttttaacaaatggtgctgtttcaactggagggcagcttgtagaagaatgcaaattgacccattctcatctccttgtacaaatctcaaatctaagttgatcaaggacctccacataaaaccagatacactgaaactaatggaaaagaaagtggtggtacatgcctttaatcccagcatttgggaggcagagacaggcagatttctgagttccagaccagtctgttttacagagtgagttccaggacatcccaggcaatacagagaaaccctgtcttaaaaaacaatgccccccccaaaaaaaggggagaaagaaagaaagaaagaaagaaagaaagaaagaaagaaagaaagaaagaaagaaagaaagaaaaaaggaaagaaagaggcaaagaatagaacaccattagcttttgctctaaaatcaagaagtgataaattggaactcataagattacaaaactttggtaaggcaaaggacactgtcaataggacaaaatggcaaccaacaaattcgtaaaagatctttaccaatcctacatctgaaaagggctaatattcaatatatacaaagaactcaagaaggtagactccattaaaatatggggtacagagctaaacaatgatttctcaactaaggaatagggaatggctgagaagcacctaaaaaatgtttaacatccttaatcatcagggaattgcaaatcaaaacaacgctgagatcccacctcacaccagccagaatggctaagatcaaaaactcaggtgacagcagatgctggcaaggatgtggagaaagatgaacactcctgcattgctggtgggattacaagcttgtactatcactctagaaatcagtttagcagtttctcagtagattgaacatagtactacctgagaacccagctataccactcctgggcatatacccaaaagatgctccaacatgtaaaaaaacacatgctccagccttatttataatagccagaagctggaaagaatgcagatgtcattcaacataggaatggatacagaaactgtcatacatttacacaatggagtactactcaactattaaaaacaatgaattcatgaaattcttaggcagaagtatggatctagaaaatatcattctgagtgaggtaacccaatcacaaaagaacacacatggtatggactcactgataagtggatattagcccagaagcttgaaatagccaagataaaattcacagatcacaggaagctcaagaaggaagatccaaatgtgaatactttgatccttcttagaaggggaacaaaatatccacaggagaagatagacaaagtggttgaaaagagacagaagggaaggccatcttaaattgttatagccatggtgaatggtgtacatttgaaaatacaaagggcaataaatttaaagttttagaattaaatgtaattcagggtatttaattaggcctaagaatgtataccaagaacatgaccatatatcctggaacattattttctcaatttttaactgcaaatatgtgaactttctcatacatttttttttcttttacactaaaacttttcaagttttctcagtacaggctggtttgtatgaataatctcatggtggtagttatagtaaaaatatatcaaggtcagtgctggtaagcctgtatgcaagcagcactaagtgtaacacactgcaaatagctctagctgtctaagaaactggattgagaaatgtcaacagcattgttcaggtttatgaacagcaattaatattcattcacaagatggtctctatttcctgcttttctacttatgcaaataagactgtcagtctagcagcagacatgccattgaagagttcatgttggcacatgtgtatactgcataaatattttgttttcctttcttagaaagatctttataaaactgactctaaagtgtgtacatataaatagtctgtaaatacataagaacttgtcttttcatccaaagcagagataacatattctggggtagaacatatttgagttgaatctgggtaaacagtatgtctaacaagagaaaagatagcttttagaagaaaggaggatagggaattgatgcctacggaataaaatttgcttcggtgtcattatttaattatctgattaatattatttaataatgcacattaatttacagtaaggaagcttgttgacctctttctctataatttccacatcaggtctcttgatatctgtaacctattaattttataggcatgtcatatcattattcaattacagttctaggtatcttggagagatatgaggaaaagatgataattaggtttaaaacatgactattgctttcctattatcaagtagatggcctgcctctttaatttagtcaggtagcagtttcacacaacacatattcacaaataatgatactcacaaatgctataaaatatgactcaatgtccacacaatttattacctgatgaacatctgagcaccatgtatgcaacacaagcagctgaccaacatgggattcttattcccatggatttcctcttcctagagtcccagtttttcctatcatgatatttcctcacttgatatctggtatcaaatgtgccatttgatgctatctctgtgacatcatcatggtttcctacactactgtgaagaagatatccataagtttgcccagcttcaaaaaactgggcataaattcctcctctttcctaagcatggttaacagtattgattccttgtgcttccatgatatgaacttgcttttttttaaaaatgcacaccctaaagcctccacatcatttgttttccactatattgttatatttcaagataaaataccattgctattccttataagtacatatccaaaatttattagcacctatctgctgttctaggatggggaatgaggcagaaataaatatacattctgtttgtactaccggttatttaaacccagtgaagatgatattagagttgaaaaagaacagacaggagcttaacagaatatttttttaggcatagtatattttcaaaactttatcctctgattgaataaggaccacatatactttatgaaaagatgataggaggaaagacttgtttctagtggaacaaacgtgatttaagaaatcttcactgaagccacatgaggcatagggagaatgctctatttggaagagtgtagttgctttcagccatacctttggtcattgatgatttagttattttgtagagcagattcacccctgagtttaatttctttgaggaactgggaatgaatgttttcacacttacatatagactgttgttattcattgtagatggttgtaatgaagtagatgtaaaacaaatctaggggtgggcacagatggtccacccattagatattcttttcaaacaagtaagaaggctgagtatgaatccacagaaactgtataaatgctctggagagtatcagacttcttataattccaaccacagaacgtagaaagttaggattcaggattaagaccagtcatttcgagaactttggggtttactgatatcctacttcacttcagtggttgcaatagaaagaatgattaaagagcatccccttgttaactctgggactccaagtgcacattcacacttgtgaatacacacccacacatataaccacacataggcatgcatagatgcacacatgcttatattcaacacacacacatacacttaaaatatgaagtaaaggatggaccatctagagactgccatacctggagatccatcccataatcagcctccaaacgctgacaccattgcatacactagcaagattttgctgaaaggacccagatatagctgtctcttatgaggctatgccagggcttagctaacacagaagtggatgcttacagtcagctattggatggattcacagggcccccaatggaggagctagagaaagtactcaaggagctaaagggatctgcaaccctataggtggaacaacaatatgaactaaccagtgccccctggacctcgtgtctctagctgcatatgtatcagaagatggcctagtaggccatcattgggaagagtggccccttggtcttgcaaactttatatgccccagtacaggggaatgccagggacaaaaggtgggagtgggtgggtagggaagtgggtggggagggtatgggggacttgggatagcatttgaaatgtaaatgaagaaaagacctaataaaaataaataaataaataaataaataaataaataaataaataaataaaaaggtaactcagaatttctctgctaacaatgaaacaccctcagaaattgccatcagctactaacctctctgtaagatttctgcattttgttcttgtggaataatgaaaaatgagacttcccctccttcagtcataacaacatagcataaatgttccagtttaaagtatagagatggattgccaaatatgaaggtgccttggtgtttgaaataattaacgtgtactattgctgataccatccaaggccagcaatggaaagatccatggtcacattcctacttggctcatgtgtgttcactgtctttttgtgtcattacaatacagtccatctctgtgtctgtctctgtatccaaatttctgtttttagcaatgatgtttttcatattgagcttattaaaaagtttcacttttttataaatcacattttaccttgatcatgactataaatgttcttccgtaataaccacactcagaggagatagataaacaccagcacagtattcattgtgccttttactttttgaaaagcagttcagtgacagttcccacaattgttctagggtttattatatagaggatgactctgtgacaatccaatcagatgaatcttcattttcagatacatttatgttcctagtgcaccttttctgtttttattcagtcaataacatttaattaccactagcagatgttttataccacaggttctgccctgtcctgtcaacattattcctctagttttacgacctcatgggagcaggacttctgtcttttcacttctctactttatatgtagttgctatgatgtacactctgtattaggctcttcaaacatgtttgctgaatggtacataaggttttctctactgcatccctccctctgtagaaggtgtaaagaaggggcatcgcgagtctctgttctcatggctgctgtgtatcatttttactctcagcatcccagagccatttacatactcatattagttcaagtgaacagcctttcaggaagcatcattcattgcactgtagcatatttcacttcactgtagtatccacatcccaattctcagtgagaaatgagcttcaacaagctcaagcctccacatatattttagctgtttacaaatcccaccggtctctactattggagaaaaaaaggatttaggtagcaacaaaggcaaaacaatgaagcgtagggaagccagatatcagatggtggtgaaataatacagggtatttcccctctctcaggtattcacttggagagaaagagaggctctctgcttagttctagtgagcctaaagcaccatgttgggttcacttagcaatcagcctcattaaaatcattatgtttctctacccagaatttggcttccagatcacttccagtactttagatgttcactgccatggtttttagtgagaaatgaaaaacaggctttatttccagatcttccccagcaaatgaacttcataaaggtgccagtgacaaaataaatcagttatctggtgctctgagccgaatttagctgctgttattgttggctgatatgcttctggggaaaagacatttcagaagggactaaatccacatgtagctgctgtaataaagaaacgtttagccaaaaaaaaaaaaaaaacctcaactttacaaggactatgtaaagttggaagctaacttactaagaaggctgtgcaaaatctattaattcaaggctatctagttgtaactgactcaagtactgccagggttatgtatgcattcaaagtattgccattttctggcacaagtttcatggcatgctgctggaaagaagttggatttgtaagtataatcactgtagttcagctacttactaactccctgatgttagtcatgtttctgcctttctaaatctgcctttttcatctttcaatgtagctgataatatcctctcaagatatacatgtgcaagttaaattacttagaacgtatgcacagtcagttccacttctgctattctggttattgatgttataaatctgccaccaccttagtcccatcactttggattattttaccatttcagcaaaatacattcctgcttttgtttctgcgggttgggtgattttgaacataccggttccctggcagccaagtttcccacctacctaaccagagactaatgatagtgtgttagttagggttttactgctgtgaaaataccacgactaaagcaacacttataacaacaacatttaattggggctgttttacaagtgatcctaggtgaccatcccatggtactgacatcttcaatattctatggtcttccattgcaactaggcttcatcattcacctctcatgggcttttttcatggggccaaatctcaactcctttgcataacccccgcagtcctggcctgacaactacaactgaggctgtactttcaccaatggcctttcatggcctctcacagtaccaagcctcagttgttcttaatgtccccttcatgccttcaaaatcagtaccacctgggtgactcttatacattaccaatacagttggagcacaaggctatctctggaaaacaacttatttgtgctctcagacacttcccagaagattttacctcagtgatgctggtctgctattaatcaccactaatttcttagttccagcaaaccagcatcaattgtcccagtagtcctttctactctggactctaacaccagagccacatgaccaagactgttaggttctgctgcttgctgagactggatcatggccccctagttttattatattatcacgagttttctgtttttcaacttcttcactgcctgagcttggctgccctggaacttgatccatacaatgactttgaactcagagatctgcatgtctgtctccaaaactctgggattaaaagtgtggtccacctaatctggatataagcttttcttcactaagaactttctctgttctaggctgggcttgaactcagagatatgcttgtctttgtttcctgggattaaaggcttgtatgacagtgcctggacctaaatttagctgggtggaatcttgccccagggtcactactcccttaattgaatttaatatccttgaacacaggattcagatccattttcactggtaccccttaaatactcaaaccatatattttatatttttcctttctcagagtgctatgcttgtttaaaactctcttcatgaaacttagagaacaaagtcaatgacgggaatttttgagacttcctttgtcaatataattaatctgagtctcttcaccttagcctccggcagattcttcagacaaggtcaaaacgcagccacattctttaccaaaataccacaaaaacagtcactaggccacatattgaaattctccactgaaacctgttgggccaggtccccacaattcaaatcactctgagtaacaaagtcttccatattcctactaggatgggccactaagtcccagttaaagcattctactcccttccaaatccaaagtccaaaaatacacactcttccaaacaaaagcatgctctggcctatcacagcaataccccccatccctggtaccaaattctgtcttagggttttacttctgtgaacagacaccatgaccaaggcaactcttaaaaggacagcatttgattggggctggcttacaggttcagaggttcagtccattaacatcaaggtgggaacatggcagcatccaggctctcttaaaatataggcagtatgtgacaagtacgttgttaattaatataatagtgaaagtgaaggaggtagagagtaaagaagaggcagggaatatgcatgaataaaactcgacactattctcttagacagttgttatcagctttctgaccttttgactatttcctgagagctgataatatggtctatgccaatcctgttaacaatcacaacttctgctggatgatgtgnnnnnnnnnnnnnnnnnnnnnnnnnnnnnnnnnnnnnnnnnnnnnnnnnnnnnnnnnnnnnnnnnnnnnnnnnnnnnnnnnnnnnnnnnnnnnnnnnnnnnnnnnnnnnnnnnnnnnnnnnnnnnnnnnnnnnnnnnnnnnnnnnnnnnnnnnnnnnnnnnnnnnnnnnnnnnnnnnnnnnnnnnnnnnnnnnnnnnnnnnnnnnnnnnnnnnnnnnnnnnnnnnnnnnnnnnnnnnnnnnnnnnnnnnnnnnnnnnnnnnnnnnnnnnnnnnnnnnnnnnnnnnnnnnnnnnnnnnnnnnnnnnnnnnnnnnnnnnnnnnnnnnnnnnnnnnnnnnnnnnnnnnnnnnnnnnnnnnnnnnnnnnnnnnnnnnnnnnnnnnnnnnnnnnnnnnnnnnnnnnnnnnnnnnnnnnnnnnnnnnnnnnnnnnnnnnnnnnnnnnnnnnnnnnnnnnnnnnnnnnnnnnnnnnnnnnnnnnnnnnnnnnnnnnnnnnnnnnnnnnnnnnnnnnnnnnnnnnnnnnnnnnnnnnnnnnnnnnnnnnnnnnnnnnnnnnnnnnnnnnnnnnnnnnnnnnnnnnnnnnnnnnnnnnnnnnnnnnnnnnnnnnnnnnnnnnnnnnnnnnctatagaaactttatcaattctttctaatccaatgttctttatatactatatatagtatagttagaaatatatattgactacacacacactacacacacacacacacacacacacacacacacacacacacatagtgtgtgtcactcactcctgaatattctgtacacagtgatatttcattttcttgcctctacttagaatgatactatgttttaaaattttaatttccttcttgcctccaaatgccaagttcaaaacatttttttttttttttttggacaaggtttctctgtgtaaccctagctgtcctggaacacactttgtagaccagggtggccttgaactcagaaatcttcctgcctcttcctcccaagtgctgtaatcaaaggtgtatgccaccactacctggccaaatgccaagttccaattcattccctctccagagagtctaatatcttctatagaaatgacaccctccatcttgcttttccacagtcttatggagttatatctcctatagtattagtatttacattttcttttataatgcatttactgtatatctctctcctgctctccagttagactagcaattacttaaacaaatgctttactgaggatgcaagcaatgtatgattttttagatggtagaatttcaaacatgtcttcttatattataaaatttcattttattgagtatgtattataatttaattaatctgatttatttactgtattcaacaccagatagcagttgaaaacagatgaatgaaattgagagtgttagcaaaaagtatgggttaagtatgggtttaaaagtatggnnnnnnnnnnnnnnnnnnnnccacattctttaccaaaataccacaaaaacagtcactaggccacatattgaaattctccactgaaacctgttgggccaggtccccacaattcaaatcactctgagtaacaaagtcttccatattcctactaggatgggccactaagtcccagttaaagcattctactcccttccaaatccaaagtccaaaaatacacactcttccaaacaaaagcatgctctggcctatcacagcaataccccccatccctggtaccaaattctgtcttagggttttacttctgtgaacagacaccatgaccaaggcaactcttaaaaggacagcatttgattggggctggcttacaggttcagaggttcagtccattaacatcaaggtgggaacatggcagcatccaggctctcttaaaatataggcagtatgtgacaagtacgttgttaattaatataatagtgaaagtgaaggaggtagagagtaaagaagaggcagggaatatgcatgaataaaactcgacactattctcttagacagttgttatcagctttctgaccttttgactatttcctgagagctgataatatggtctatgccaatcctgttaacaatcacaacttctgctgatgatgtgccattttccagtgctctttacaagtgaacataatgcaggacaagtttctcagtttttaaaaagaatgtcaaggttcctaatatacagaactagacagcaagcacctgagtaaacgctgacattttctaacataattatgtgggtcagttcttctacatagaagtcctaaacttttgtttacagggagaggagtatttctcactttgttaggaaggaataaaattagctttgttgggagaggggctgaaagtataaacagaaccactgattttcctacatattcaaatttcatataatgtgttcttataatgtgttctctaactgttaaagaacacattatatgaaagtttaacccatacttttaaacccatacttaacccatactttttgctaacactctcaatttcattcatctgttttcaactgctatctggtgttgaatacagtaaataaatcagattaattaaattataatacatactcaataaaatgaaattttataatataagaagacatgtttgaaattctaccatctaaaaaatcatacattgcttgcatcctcagtaaagcatttgtttaagtaattgctagtctaactggagagcaggagagagatatacagtaaatgcattataaaagaaaatgtaaatactaatactataggagatataactccataagactgtggaaaagcaagatggagggtgtcatttctatagaagatattagactctctggagagggaatgaattggaacttggcatttggccaggtagtggtggcatacacctttgattacagcacttgggaggaagaggcaggaagatttctgagttcaaggccaccctggtctacaaagtgtgttccaggacagctagggttacacagagaaaccttgtccaaaaaaaaaaaaaaaaatgttttgaacttggcatttggaggcaagaaggaaattaaaattttaaaacatagtatcattctaagtagaggcaagaaaatgaaatatcactgtgtacagaatattcaggagtgagtgacacacactatgtgtgtgtgtgtgtgtgtgtgtgtgtgtgtgtgtgtgtgtagtgtgtgtgtagtcaatatatatttctaactatactatatatagtatataaagaacattggattagaaagaattgataaagtttctatagatttatattttgacaaaatattaaaccttagtagaaaaagtgtcagagggagagagaagaaaagatggattgaatttccatctgaattaaaacacacagacatttgtatgtttataaccccttcttaatattctagctttgtcacagctcaacagaaaaacatgcacattcaaccacctaaatgatagtgttacttttgctgtaatttgttagtagtaatgcagtctcagtttaatttacatctctattatggcaggggaaactttgtttccccagaggaatagagtggcaagtatgccaatggttgcttagtctcctgaaaaataattatgcatatgttgtctgaatgcacatacttgtgaggttctattgctttggatacctgtggagtttttcatttgatgagcacatggagagaatttgtaagaaaaataattggaagtccgaaattttctggcatgtggcaggaagagatgaccaattatgaccaagaaaaccctcagaaatttcatcataaagaagatccatttctaaaagcttggcagttatgtttttttaaaagttgatatctcaatgataatgctaataattgtgtttcagtgggggattttcatgtttatgttttcatgtgtgtgtgtgtgtgtgtgtgtgtgtgtgtgtgtgtgtgtgtgtatgtgtatcattaaattttcccaattcccatctccattttcttctgtactttcacatgctttcttccaggtcatcttgcttttggctcttatgccatgttcactctgttatcatctcctgttttcttccatttccctatagacacagtccttacctcttgtagcacatatcatattccatatgtcataaatcccaaactagatatatttaaatctatttcctattaaagaatatgttttatttgacttcctgtgtgtttgattactttgcataacacaattatttccagataattttcaagcaaatgttataatttcattttgattacaagagagtaaattccattagctgtatgtgtgagattgtgatgactgtagaccccttgtgaataaaataaacaggtgtctccagaagtagaaatattctttaatcggaagaattgaaagtctgcagtatccctgtagaagtggaaactgaatggatgttgtgtaggaaacttgggttttataagacagagaaggaaaaattcggagatggaaaattccatcttcatgtcaattcccctgcagtcttgaagtgattaaaaaacagtgattttggtatgtaggtctcccagctagaaacttccaaaggccttttaaattaagacaactttttcattcagagcttttcactccatcccagcctcttaggttggttcttttacagtatacatcccatttttgctatcaattcatttccctttgggcttcttgactagttctatatcttggatattaataatccttttgaattagacatgagtgtgttgtgatcattctggtctgctgctttagaatctgttgagtatatgcctatggatgggacagctggaccacacagtagtactacatttagctttttttattattattatttttagaaacttccattctactttctgttgttgctacaactaaggcttagtttttttttttttttttctacgcaccttctaaacacatttgttgtttttttccctcttcttgataatcatgctgtctaagtaagatgaaatttcaaaccaatttcaacattgtttttgatagcttagaacttgaacattttttaaatacttattgattgttggtatttttcaaagaaatatcattaatccatttgctattcaaatcattggatttattttcctattacaattctttatagattctaaacattaatcacctgccagatatgtagttgacaaaaattttctgcttttataaggtctctttggctgctaaaaatttctgctgctctgtagcagatttttaatttcataaaatcttgtttggtgatttgagaagttgttttctgtcctaaatagcattgcttgaagaaaatccttggatctgtgtatatcttgaggaattttttctggcagttttaggtttggggagcattcgataaaatctttaatccattttgaatttattattattcaaagtgtaatatagatcccactttaatacttttgtcttatttatttacttatatcccaaatgctgtccaccttctggttccccctcacaaagtctctctcccttctcttctcttctaagaggtatgtcccctggtcatcccccaccctggtgaatgaagtaggtttgggcacatcctcacccacaggtgtaaaacagggcagtcgcatttggggatggataccacagtcagtatatagctttagggactttccctattccaattgttggggaaatcaaacagaaacaaagttgtacctatgtgccagggccccagtctataccatttatgctctatgtttggtgacacagtatctaagagcttccaggggtccaagttagttgactctgttagtcttcctgttgagttcctttcttttacagatggatatatgatttccctggtgtcatttgttgaaaaagtgcattgtattccaaagtatacttaaaccaaagtattgaaatttaagtggctataactctaggttttttttttcttctctagatctacattacttttctgtgatctatgtaattggtctatgtgtcttgcatgtatattcctcaatcccagtcaccttagcatcatatactagagatgcacatacctgtgtaaatgctgaacataccactgctttattttcaaaaatctttaattctatgcctttattctcttggctatattggtgtttcctagttagacaacattgaataattaccttagatatagttgtactctatatatttgactatggcatagtgcagaaatatagatattttaaaccatcactccaggcaaattgtcatggcaatatttgtataatgaagaacattatttcaagaacttgatgtatgaagtcttttctcttgcacatgttcagacaaaggatctatcaacattgttacttcagaaaattaaagtaatgaacagataaatgtaggaaataagaagatttggaaacaaagaagaaattgacaatgtctagctttctataataaaaatatcaacaaatgttaatatagaatgtttagaaagattcatgtcataatgccaatatccaaatgtaaggtctcttactcaattttctactcatttttttctcagaattaccagattcatgtagtaaaagtatgatctatgtatagaaatagttttgcttttcagcttaaagataataaggccttaagatgtgaagatgttttggtctatagagaatttttgttgcaatcacaaaatttaagttcaggccttatttctggtgcgtttagatttgagttcaagtgtcatttctgtgcatttataaccctagccctgaggaagtggagacagatccctgagactctctactaagatggcttatttgaagaactccagctcaagaacagaccttggcacagatcccaaggaatgatactgtcttagggttgtcctgctgtaagaagacatcacgaccaaagcaacccttataaggactttatttggggctggcttacaggttcagagattcagtccactgtcatcaagatgggagcatggcaacatccaggcaggcatggcactgcaggagctgagagttctacattttcatctgaaggctgctattagaatactggctttcaggtagctaggactaaggtgtaaaagcccatgcctacagtgccacacctactccaacaaggtcacacattcaaatagtgccattccctaggccaagcatattcaaatcatgacagataccctaaattattgtctgtgtttactggctcctaccaacccataatgcatttttacactattggtgtccctcaatcaaggtctaatatgttcagtatcaaactgccttttcagaaatctattccctgtcttttttcatcatggatgaaaagatcttagaagtcatttaattcagtgaatcacttctgaggatctttctctatgggtacatcttaaagttttgtagagttagtttgttttttcttgagtagactacacaagcattttaagtgagtagctgttgagatgtgcatattttggtgaatgcagttttcctactaaaggcataaagtaaagtgccatttagataataggcagcataggattctatgattcagtctctgaagattatacactttggcctctacagactaattttcacagaattttgattcaactttcaaaatgacttatatggttttaatctgtttcgcagcactataaaagacaacatcaggctaccccaattaaattaagcaatatatttgagtctcttgtttccggatgttgaggagttcaagaccaaagaactattagctggcacaagtcttccttttgtgccattttttggcaggatggagaaaatttggtgcagaaaaacagccaggcagagacagggagaagagcatctaccctgttatacagaatccacacactcaagataatgtcatatacagtatcagtcatccaatccaaacacaagggccgtgacctagtgacaacaatacacttaattaggctttcctacaatctgtgccgctaggaggaaaaacctccaacatatgaacaaataagggacctagcagtatagacccttgactttcttatagtctgacacctgcaatttcattatcttgattattctggaagatatatgccattggaaagactactggagaggtttttttttaactagtataacatatatgatagaccttaatgtgaaatatgtcaagtatatgatatgccactatcaatttaaaattttaccttcactcacatgtgtatgaaaagttggaatgtgacagtgagttatgggcatagaaaatttctttcacccttgcattgcacgtggggaaagtcaaagactcaaatgttctatggggtctggaatgtagcaagagtttataccaatcatatctgatttaaagttctcaataaaatgaaacactcaaaagtattaataaaaattatctttctcactggacaaaggtgtgcctgtttgagaagaaaagttgacaatcagagaaaagtagggacagagaagggagaagaaatagagaaaataaagagaaattgattctcctgtgtacacaaacttcctttacagaaacatttacaaatatggaataataaaaactcatttaatttataattagctcaaaaaacaaaccaaaacaaaaaaatcatcaaaaaacaaaaaataaacacacacacaataaaaaccccaaataggagaactcacaaatggtgcctgtatatttataaaacactgtgaggtgcactcacaacatgaacatacaaatcagagtcagaaagaacacctttagaattatgagaaaatgtgaacagtttgtagaattgttgctagtagaagtttagaagaaagactgaaacatacaattctgaagaggaccttatgttttctagataacgatcaaaatcacaggcagaattgcaatgatgacttatttctatttaaatgtgaaaagaaaaggatttgctcataaccattcctagttttttgtttttgttttgttgtgtgttttcctttttttgctagtacaccgcaatggtgatgaaattattgtatggaacttagagtgtaaagaccaaaaaatgtactcacaactaagcaatttttattcaagtataaaaatatgttgaatttacatatattacttgaacaacacacatgcctaggcttaggacccttgtataaagaaatgtagggaaaagggagggaaatgaaaggtagagttaatgtttggtgaattgttcagtctcactggaaaacgaatcgcatacaaatgggtgaataatttaaatttgtgacagctggtgtattgttcatgaaagaatagaagtaatggcagagaaactgcagtgctggccttcctatcgtaacatccctgagtttcaactgctcagttgcttttactaaaagggtatcataggctaaacctttagacaaggcaatggaagactactttaaactaaaagagggcatagttcgccatataaaagaggcatgaagtttagagaagtggctaagaaggtattcacactgtggaggatattatgcaagaagatagatactatgtcatagacttcccagggcatgcagagggatagccttttatcccaccaaaatagtgctgtgatgaagacagaattaaaaaccaggctggcaacacatcattctatatattgaaaacaaatggaaaaataccaacctactagttaatattgggttataaattactggcattctacaaactgactattattacctctatgaaagtttttctgtgttttatttctaaaagagaggtgaaagtatttttataaatgcatttctctgggatgtcaattaattaataaagtgagtaagaaagtaagtaatatatttcttagttaaagcctgcaataagcttgttacctataggtcttaccaataggtcttttaataaggagattaatattaggaaaaatgataatagcaatctttctaatggacaaattttatgtgttggggacaaacagtattatcaggtcagatctgatatgtgacacatatacttgaatgcataagtaatttgtaagaattcatgagctaggccatgtaataagacttttatgaaatacaatatcctgaaggaaacctcaacaactttcaatgaaactatttgaacttatcttttagaaaccccaagtaagggacttttgtgtggtgaatgaaccaaaaacaaaaaacaagaaaaaccaaaaccaaaaaacaaacaaaccaaaaaaaaccccaaaaaacaaaaacaaaacaaaacaaaacaaaaccccaaaaatcaaaaacaaatccacaaaggaaactccctatatattgcatataatttccatccaagtatgaagacataaagtaggcctaaacgaatatagaagtgattttctttcctattccaaatctctgaaccttgtgggtagggagccagagcagctctgtgggtggagatgccaggtcagcaggggcactggtcagtttttatctccattcagatcttgctacaatttatgaaatatttggtcagggtttacaatactccttaaaaagaagaaagctcccagaagctgttgaatagaataccaggctgttagggtttggaaaataagaagccataggtgaggttgacaggttacgtggggaggaagcagacagaactggcagtttattttaagcgttccagacttcagtggatcaattttctgaaagggttgccttccgattgttcctttgaaagtgagaactgccagggccacaacagaaagttgacacctattcacttctgctcttagagaaagctaagagggaaaagaaagactcaattcttgttctttctatttattgtgctgttcaaagtgatgaatagtggcgtcgacactaaagagactttttttttttaatgtttcctgcaaagtctcaatgaacctaagtgagtacaggagtcaggtaggaaaactttttcccacttgaagagtttgtggcacagggctagggcagtggccctgtgggtccatgtgcttgcttactgtagagaatctgagttgatctacaggacatacatggtaaaagaaaagaacaaaaacttccatcagtcatcttctaaattctatgcacatgctgtagcacttgcatgataacacataatgcaaatacacacagtaatgcacacgtaattacatgtaatagtttttaattaaaaactagaaaaaacaaaatgagtttttagaatatactcagaagatactaaacttgcttatatgatttaggcttataactacattaaaatatgcttttaatttctctgtcatgttactaaattctttaattcatattcttgacttgctacctcatacaatagctatacaaacctaaagatgtcttagctgctttgatgaatttatttgctttctaaacttttatccattcaaattaaatgtacaggggatgagacagcaatagagtagtgctttttgtagcagtacaatggccagggccagagtaacagggtctgtgtgaaagacaggtacatacatcttgaaggcttattggtcagtcactgtaaacaaactggcaaccaataggttcaatgaaagactgtttcgaaagttgatggagtgggctggtgaaatggcccagggagtaaaggaacctgttaccaagactaaacacttgagttttaaccctgaaatctatatagaggaaggggaaaagtaacatgagttgacttttgacctacatacacacacacacacacacacacacacacacacacacacacacacacacacacacataattttagcaacatatttaaaagaaataaaaagaatggcgagtgcctgagaaagacatctgatgtctgcctttgatcttcacttgaacaaataaagtggagtgtaactgtccccatatggatatcaatgcacgtattacaaatgcaagaacacagaacaaaagataaaataaacatattagagttgcatattaacatataagcagcaatgttttaatgatataagggaaggaggagtttcagtctcattagagtaacaggtattaaggaaaggtgatgttaccctaaacaaactcatgcataagtgtatgttctacagaattccagcacatagaaaatgatatactactagcttatgaaacaaagccggggatccatcccatatacaaccaccaaacccagacactattgcatatgacagaaagattttgctgacaggacactgacatagtgctcttttgtgaggctatgccaatgcctggcaaatacagaagtggatgctcacattcagctattggatggagcgcaggcccctaatgaaggagctaaagaaaatacccaaggagctaaaggggtctgcaaccctataggagaaacaacaatatggaccaaccagtacccctccccaccagacctgtagttgcacatgtagcagaagatggcctagtcagccatccatgggaggagaggaccttggtattgcgaagatcatatgccccagtacaggagaatggcagagccaggaagcaggagtgggtgggttggggagcagggcagagggagggaatatggggctttgggaatagcatttgaaatgaaaatgaagaaaatatctaataaaaaaggccaaagagagagagagagagagagagagagagagagagagaagttaggttacgtcaattctggtaaggcgtgttgctgcaagttctgcagtacccggcccctcattcaatatggcacccctgcccagagcctgcgtgtccaaccacctccacatttgctcccaggagaagatcatgtaccccagtaggatggttaaactccttctccccttataaggtaatctctggcaccactggaattcctccctatatgactgatgcataaccaggccctggacttggtcaaagttgtacacacttctaatggtctaagcagctcctttccccctattaaaagctttctcactgaagctgtgttctaagagtatattctcatcttgtgctcacagctgcctgagatctcttctatatttcttggccacccccaaagttttggccttactttccctctcaggatcctccagtcaaaaccaggccaattgggctttgataggtgggaattggggccatgactcaaagtgcattctattttttctttttttaaaatgctcttgtttggggatatattactagtttatgaattgcagattctatgctatattcacaggactgttggtttcttcggttaacaagctgattgcctttgtgtggtcaagttttgatataataaaactaatacactggataaaacaatttaacagagaaaggctttgtgatcttagctttgaaggctttgtgtataatccactgatcacttccttccttcacttgtgatatcatgatgggaacaggtagctgacaaaactgctaagttcatggtagccagggatcagtgagaaggagagggggtggccagaatctgattattcccttcaaatgtatactttcaatgccctaactctccctgtctggggtcaccctctcatcagtaccctcttaatgatgtgaaattgcaaaacactgaaagctagacttttggaagcttgatgagatccaatatataatattatttttaaagtctattcctttctttttgcaagttttttctttgcattaagagtaatttctttcagcaaaatcttgctggtgtatgcaatagtgtctgcatttggtggctgattatgggatggacccccaggtggggcagtctctggaggtccatccttacatctcagctccaactttgtctctgtaactccttccatgggtgttttgctcccaattctaagaaggagcaaagtgtccacactttggtcttcattcttcttgagtttcatgtgtgaaggggactgcaaccctataggtggaacaacaatatgagctaaccaatacctccagagctcatgtctctagctgcatatgtagcagaagatggcctagtcggccatcattgggaagagaggccccttggtcttgcaaactttatatgccccagtacagggaaaacaatggggccaagaagtgtgagtgggtgggtagggaagcaggggaggggcagagtataggggactgtggggatagcatttgaaatgtaaattaagtaaatacctaataaaaatttgaggaaaaagtaatttctttgaaaatgagttctctaaataagatgtttattaatccaaacagccaattttagttctaagtagacaaacacccatacatcaaaccttttcaacttcttgagacatatacatttatacatacataatatatacatacatatacacacacacacacacatttacctgtagtatttgttattttatttattttaaagagtacttcatacttactgttgtaatgtttttcctacatatcaaaaacagaccctagatacgtgggtcactctgacattagagaaaacaatttttgtctgagcacactgtctctgatttggtttgctactctgaaagcttgtgtgatgatatttaactgtagccaaaaactacagccctggtaactaagaaacactatcctcctcatcttttgaaattcaaatagctgctgacagtttttcctaaaatcaaggatttcaacagtagttaacgtttattgaggactgactgtgttcagacacagaggggctgttattattatattttatccctataagatgcctgcggttaactacttagaaaggttactgtctagacaaagctgccaagaagcaaagcataataaaaataaagaaatctgactaggcatttagactaccaatctcatgttgttatcttctgtgtactcaattatttaataataaaaatttcccaaaccagaacaaaataatgtgttggcattggtgctttaatagaatgtgtgtgtgtgtgtgtgtgtgtgtgtgtgtgtgtgtgtgtgtgtgtgtgtatgtgtatgtaaatgttatatatatttaagccatgaaattaataaaatgttaggaaaacatgacatagcaatgcatagcaatgtggttggtagtcattgtaatacagataattataagcaacaattattatgcctatcatataaatatattcatatctggtacgatagcaagaatcatagcatcctgttgtttcaatcttcctagtatatacaacaaattaggatattaagactaactgaatcatttcttattcatttacctaataaataaacatatataatttacatttaatcttagctcatacatgtatgctcatattatcaacacacattgtttaaagacttgttgccatgtaatatgttgttggaaaataaagtgtactgcagacatatatactcatttgatgcttatgataaattgaagaggaagatgtgtttagcatcctcattttgaatttaaaacaatagaatctcaggaatgctcttatgttttcttggaaaattaattgcacataaggaacaaatatacattcagactcctggcccctccaactgtatctttccatagggaactattgaactatttcccacaattatatttaaagtgtcttgtaaggtgttctgcacaatatggttacatctgattaacactgaaatagtttctgcagctatgcctcttagagtatagtgtgagtcttatccaatagtgtaaaccaaagactgctatcacccacatgtgggtctgcttcctgatgcaagggctagagtgagaaaggaagagaaaaggaaggcagcattcattgtaggcttcctgagagggcaataaaaagtaagacttgaaggtgagttttcctgcagacagaagtcagactagaaagagaaacatgaggttgggggaagtgagaagtgaaggcttcaaggaaaatgctcatattgtgttgtctgtttgtttgtttgtttgtttgtttgtttttcctcctgctataggcattataaacttgctagaaacttctgtaaattaggaaaggaatctatctaagtcctcaaaatcaatacatgtaaaagacacctactacatttgtaagtcaatctagggctttgtgtcctagaaaatcttaaaaaggtgatctcaactaagtatcttagtattaatggtcatggtacagaagagacctacccttttggctctcaattttgaatcctttgagaaataggcctgaagtgaggtcaatcagcacttcagtgagttagctacatggtcttatggatatgttttcttttggtgaacttttctttctattttcctctatgtatctcagttcctttagtgtgccaaacaatcataaagtgacacagaacagtcatttacacaccagaatctagcttcatgtttttcatctttaaacattattttagggtgtctaagaagtcaatgacagatttttattcaaattgttttcattcatgggtgctgatttcataaaggaggagcttaaaggggcagcaccttgtgttctttatataactgagtctcctgttgcctttgaattacactttcttactctttactgatattcttgtctcaatctcaaatcttattttcttttcaagtctcatcaatagttatcatatgatttgtctttctatcctcagacactgttttacatagtttgccctgttaaaaagtagcataattataacttcagtctcaaccaaccaaacaagaaattgaattggaatctttttactaattaatatatcctgaatcttccacattattattattattgttattattactattattatatgtaaaactgatgttttatatttaatccatttctgtcctttctactacatatcagactcatgttgatactgtagattttttttgatccattccacataacatgataatttagcagacttttaaggacttatttttaaaatttgaaaatcaatttctatcattagttctgtaacatctgcacaatcctgagatctcttaaatcttatctaaaaagtgagagtcgtggcttctagctcacaaacttatgaataactcacaggcacaatagacagaaaaaaagttagtgtggtccaggcacctgctagcttctctataaatactttctagtcccgactatcagcatacaatgcaaatcttatcatttaatcccttataattcaagcaaacacttgaccctgctctttcagactcttctgagctgatgccttttggaacttcctttcattcacagtcctccttttttttttttccatattctaacaccaaaacaaaatgagttccagctaaggatcaagatgactgagttgttacatgttctattgcacttcctcatcattatataatctccatattatctacactaccattccacaaacagtttatatacggtccggagttagctgtcatactgagtgttgctagtaaaatataatttgtatttctttttgaacaaaacctgacaattttagttgaaggagagaagttgctgcaagagaagtattacagctcaagtagaaacaacaatgatatttttctgcctcatcttcatttcatattttcttaattctgatttctttctgatttttgtacctgcttcttaatagattgacaagatattcttcctacagctgccaggttttttgtatcttaggatggtgtcaattctcttcctcagtcacaattacacagttttaaaatattcatcctactcagcacatatttggacagtggaggaggtgaagcatgttggatcattctctattttagaatcaatggatcattgaagattgtatgcaaatgtctgtgtacaaatatcagtgtgtgtgaaaatactgctcttaattttattgtgaagcaaagacttgtctaaagattgaaatataatacatacaaaataaatagattaatgtacaaggtaaaatatatccaatgcaaggaaaataagtgataccaaatattataatgtatattatacattcacagaatgtttactcttaagaacaatatgcaagttcactagtaaatagttaatagccgattctggtgcttgtggattctgttagaatccctttgcagatggtaacactgaattataaaagttgaagtaatttctacaggatcaccctaaagagtaattgtctctaaaactcaatgaactttcttccacttgcctgcgtgtaccagtccaaggcttctagtacacaacattttctttattgttgtgtctcatttattcatcctaaaacacctttcactaggtgagcaatgtattatatgtgacagtatttttcatagaacctactgtgaggaatgagggattactctttagaaacaagttttaaatgtatcaatcaatgcatagcacatttagctttcctggtagtcattctttactggtaatgatgttgataaatattcaaagttgttctgagcttggggacccagaatatttactttcctccaaagacctcatttgctggtttcccacttaatgaggtgcatctaacaacaacaagtacatatccctatttttaatgacacaaacctagactttgttttagcttactaatgtgcaaaatgattgttgtgtgacttttcctggggagatatgaacaaacatctattcatttgaaatagggcattgaggacagaggagtaaaccatttcacccaaagttacatcatacctactacatttttttcattttcttttattatatattttctttatttacatttcaaatgttataccctttcctggtttcccctctggaaaacccctatataatctcccctctccctgattctatgagcatgctcccccccattcacccacccacccactcactcccacctccctgcccaggcattcccctactctagagaatctagccttcacaggaccaagggcctcttgtcctattgatgccaaacaatttcatcctctaatacatatgacatggagtgatgggttgctccatgtgtactctttggttgatggtttagtccttgggagctctggggagtctggttgcttaatattgttattcttcctgtggggttgcaaagccttcagctccttcagtctcttctctaacttctcccctgagaacccagttctcagtccaatggttggctatgtgcatccttgcctctgtatttgtcagggtctagaagaacctctcaagagacagctatatcaggctcctgtcagcaagcactttctggcatctgtaatagtgtccgggtttggcgactatatatgagatagagcccctgctggggcaatctctggatggcctttccttcagtctctgttccacactttgactcagtattttctcttctaagtattttgttcccccttgaagaaggcctgaaacatctatacttcggtcttccttcttgaacttcatgtgctctgtatcttgggatttgatgatccctattcactcatatacacatttatacaatacatacatacataagcacacacatttcaaaattctaaaataaatatcaaaacatagtatctatgatttccaagaactcaggaaattgtcctttgttttgaacatcaatccctctttagacatacagtttgtaactatattctttgattcaagggtttcctttacgttttcttaactgtatgttcagtagtgttaaaggtagctttttcatttgaattaatatttacttgtttttctttgttctattcctcataactcttatggcatacccaagaaatgaagcatctaccttctgcaagttacatacactcttaatttgcagttttactcatctctatagatagataatttatgaatttctatttctagatttatttaggttttcatgctatagattcagtaaactaacctatttaatactcatatatttatgtcatttaaaaatacttcatctttagtttgtttggtttttttttttcaaatataaacacataactcccttccggaaacttggcaaatgttaagttaaaagttctagtactacctgtattctgaaatattcttttcatcatactttaagctatagttctattacctgataagatctcttgctagaccaagtaatttttttttaattataatctgacttaaaagattttataatcagtggtattttgtctttaggaaacattcaatgcaatgttcttgaatgtgtttttattatttataatatttatattattttctttaaaaatccatattcaaactctattagaaatctatccttatgtgaagaatatataaattcaagtaaatggaagtgatatatcccttgtggaagacatggctttgtgttagaagtgggagttcttttgcataaagttattttgcatatcagtcaattagtctatgattctacttatgctgataggttctgtggaataaaatctgaaatattgccattaaccatttggtatggcaagaattatctgctatgatctggtaaatgtatatgacattgaggttgaagttggatgaggaaagctttacaacaaaagcatcagcaacaaggagacaaggataatgaggaggtacaggaaaaatcccttacttcagtgctacttgctgggcttttgagagttataattaatcacatccctttcccatctgcactccgaatcaagtaagaaacaaaaagcatcgtcagttagggattaaaatatcaactttaatgccattaaacctaggtgcaaaactactgttttgtatgccatgataaatgagtcctcttagaacttctccaagacaaggccagcgtacagttaaaatattgatactgggaactttctttcctccaacctgagaatcactgaatatggaagcagagtagggaataaagtccttaatgcttgtaaattattcattcaaaacaagtgatgggtgcttgttcattacaaccccatcaatcaggctcagtcctttttccaaagggagaaataaaacacgagcaaaggagactcagattgatgaaggaaacacatgtaagattctcctatggaagcaaagtgggtgttttcttacataaatctcactgtactggtatagactttgaaaaaatgtagacatactttttatgcagtgtccaactatcaatgtattttcacatctatgtggtagaaagagagtcatttgtttttaggaaggtggtccttcctaggttgtcatgcttcagtgggtggatgcacatccatgcacactaacaatactcttcagagtttgtagattaaaaataagagaatataaagttagaagtaagatatggaaagctttttatgatgggagttggatgggaggaaactggtggtgtttgatggctcagaactcagatgcgaacttttcaaagaataactgcaagtatattatagtattggttattttatttatttaaatttatttatttatttattttattttatttatttatttcacatatcctctttccccatttccttcccacctacctctccattcccaactcaccactctagcacccccttatgctggagtatcaagcctctacaggaccaaagggctcccctcccactgatgccagataaggcaataatctgcttcatatgtagctgtatccatgggtccccccatgtatactctttggttggtggtttagtcccttggagctctggggtatcgggttagttgatattcttcctatagggatgcaattcccttcagctccttcagtccttctcctaactcctccattgggaatccacaggctcagtcccttggtaggctgtgagtatctgcatctgtattggttaggggctgacactgcctctcaggaattcctgtcagcaagtacttcttggcatcatcaagtgttggggtttggttggatccctatgtgagaccatctctggatgagctttccttcggtgtttttaaactatttatcaaatcattaagtgatagaggaatttggaaaatatgcatctaataagacattgacatctatcatacataaagagttccaacaattcaccaaaaatctaaatgacaatgaacccaatttaaaaatgagaaaatatctttattgatatttctgcaaggcaaattgctaataataagagtgcaaaaataatatcaaaggttatttatataaaaatcaaatataaaaataaagtaaaatatcatagcactcttgttaagatggaaatggagagaagcctaaggaaaagaaagtgcagttacaggcccaaagtgagatccagctcatggcgaagccccaaggtctgatgctattactgaggctatggagcgctcacaagaaggggcctagcatgatcacactccagaagatccaacaagcagctgaaagagtcaaatgcagatatttgcacccaaccaatggacagaagctgctgacccctgtggttgaattagggaaaagatggaagaagctgaagaggaaggtgacagtgtaggaggaccagcagtctcaattaacttggacccccgacatctctcaaacactggaccaccaaacaggcagcatacaccagctgataggagtcccccaacacatataccgcagaggactgctgggtctgagttcagacagaaaaggtgcacctaaccctcaggagactggaggcaccagggagtttagaagtgtgatggggttagtgaaggggagtaagggagaggtgagggtggggatatccttgaggaaatggggccggggaggaggtagaggatatgaaacagttagagggagggcaagggggggggagtaaaatctaaagtgttaaaaaaatataataaaaagaggtaatatatatatgtatattatatatttaatttatattaaagatggttgtaaaaaagagtaaataaaaagaaggaatatatacatatatttaaaaatatgtgattgttgccaagccagaaaaaaatgcaggtaatagaaaatctagatgatgtactgagacatcagaacatttctcctttgatggttggcatgtaaaataatttagccatgtggaaaacagtatggtgagtcttcaaaagttaattgtgccattaatattcaatctacaagtctcattctttgatataaagctaaaataatcaaaagtatgttttaggaggtatatttatgttcgatatcccagtagtcacaatgtgcagaaaatggaagtgtgaacatacgaatcactctggatgagggatatacacagtttaataaatagctgctggtacagaataattatcaactcataagaacactgaaatcagtagagttcaggatggaaaaaagagaattgtggtttagtatttgctttgaaaatttaaaaaggtaattaagatcatattgcaaagataattaataagataatgcaaaaatatacttttcatggctacgtgaaaatttaatacaagcacagtggtgatgttggcctagaatatcatcttagatgtgtttatactttaatatattgcatgcttgcacattacctcactcaaccatcaaaacaaacccacaaaatgcaaatggacatagtttaaaacatatacacaccacagctgaggaattatagctctcctaagtgaaaaaaacctaactcaatccatatgtttttattttaatctagtaatttatttttacattaatcagcaacttctattgttgccagtggcaatagtgacacctggctttattatgagttttctcttatgccaggcagatatgtgtgcctgtgtgtgattaattctgttcataaataactctataaatgaaattaaaaactgtattggcaattctgaccatgaatacatgtattctaaggttttagacaatattaaataatgtattttttgagattagaacataatcactactgaaaccttacctgaacagtgtgaaaaatattttaaacactagagtatattcaaagtgcaaatatgaaaaagcagcattctaagaaacacacgtacatgcacatatacacaaacataaacacatatgcacacacgtgtgcacacacactacctacactattccacctcagtttatctcacaatcatctgtttcttgaacacttttctagttcaaggaaaactgcctctctcctttcccaggatcctgtcaaagttacttctcgatgaacattcaaaggtttgctcatctctttaaaaacacatcagattcccaccatctctcattagtctagagctactcttatttctaacagtgttaagtctcacaatatgactttctcccttcaaattgggatctaacatgtatatttcacatgccttgctactgtgtatccttaagtaatcaacacaaacaaatcttttaagatgaaccaccatttgctgttcatcctaactcctcccattacttattgtacagaacatattttatttcatataaaaagttgaccataatgtgaaaatatcacattactataatggttggcttatggccttcttctcctataccgtatattttctaagtcttgaaaccataaatgtgcttcattgcctgtgggcatagctgaggactcatctcatcagtaagtgaggagtgaacaacgaatctaatgtgtatgatgaatgtcagaatgagcaagcttgagtagccaccaattctagcattataacattcaaaatcactgattgttccaaattgacatttgatctttaaccctttttttttttacagtccagtcattatccccctcctggtcttccctgcaacagttcctcatcccatcccccctcctcagtttccaagaggatgtcccaacaccctaaacccaccaggcctctcactacctgggacctcaagtctcttgagggttaggcatgccttttctcactggagtcagactgggtagttctttgtagtataggtgtcaggagcctcatatcagctagtgtatgctgcctggttgttggctcagtgtctgagaaatctcaagggtccaggttagctgagcctgctgatcttcctatggggtcaccctcctcctctgcttcttccagcctttccctaattcatccacaggggtctggattctgtctattggttgggtgtaatctgactctttcagctgcttgttgggcctctcagaggatagccatgctaggctcttgtctgtaagcacactataacctgagttatagtgtcaggtcttggaacatccccttgagctggatcccaatttggtgtaatcactagacttccttttcctcactctcttctccatttttgtccctaccattcttttagacaggaagaatacttggtcagagtttttaactgtgggatggcaaccctatccctccacttgatgccctgtctttctactagaggtggctctacaagttccctcatctcactgttgggaggtgagggacacttaggactcaaagggagagaccttagatgaaatgccaaagtagtacttttatatattgatttttattaataatattaactgactcattgctttcactattatgtgatacttctcatctaatggatctctctgttgaaattatgttatatctaaaatgcatgctatgcagacattttatcacattttctttcctgggttattatttttatcagagctagcacaattagttttagaccttgactcttccattagtcataaactgaaccaaagttacattattctctatgggaagaaatttattttacactccacaaatgcttgaagattttgttaatatttcctggtcataaatgtctttcctgattgtcagtgtatgaacttatataagatatgaattcgccattggtttggtattaaacagtgcattctatcaataccaatgaataatgtatttctattttattctttttagaaattcatacaatgtagtttgaccattttaagtgcacatcttcaccttacttctcctagatcttccttcaaatgccatgtcatctttttgaaatgtatgtattttatcaataccattcatataaatttggatgtgtcacaatttacctcagtgtgatcatcctctcaagaggcacactctttaagaaaactgactttttcttcttccaaaagttatcaactattcgtagtttctaagaaatatagggtaattatcccctttttacttcatgctagacttctgactggtttgctcttgtgtaagcctatatgttatgatgaatatatattgcttttatcaaggaaaagcaaagcccaacaccacatgctgcaatcaagtaaatacagtgttagatgaatccagaaagaaaataattataataattataacaatttttcttactgtttatgaattaagtaagttacatatattacagtttgttctatcaataaggtgtaacaaatgacccattatgttttgaatcattaaattctattaatgtagaacacactttgaatccaaactttaggaaacttaattaagtttgctagtttgagaccagtgtagactgcatagaacaccacaagacaagctgagatacatagtgagaacctgtctcaaaaccaaaccaaagcaacacacaacaattccaataatgtaaacacctaggaatcatatgctaatatgaaacttactaaaatttagctttaaatcagtacgacttcctgtccccaagaattactttttaaaaataatttacatttctaatggatatttatgtatttacatttcaaatgttatcccctttccctgatttaccctctgaaaccttcctaactcatcctcccttcccctacttctatgagggtgctccccttcccacccacccctcctaccttactgccctggcgttcctctaccccaggaaatccagccttcacaggatcaagggcctctctatcttggtaaatctctccattccaaatatgccccggcaatgaaaacacaacacaattaatatgaatacatgctgtgtgcctagattgggcagatctactgctacactaccatcttccacacctattgatctcatctaccttagagcttgaggtttctcgagtccatgtgcttctgctgcatctttcttcttcttcctcctctcccttgtgccctctccctcttccattttctccttcttctctctcctcaccttctgctctaccttccctcatctacccaattaccaactctcctttattttacaaattaaggtgggaagcgggatcataaaaaatcacctaagtgctgactcattccttttttgcagccactcacaggggaacagaattaacatcaaatataattagcctcggggctattcagaatatctcttcttctattgatgccagataatgccattcactgctatatatgtggctagagccatgggtccctccacgtgtattctttggctgatggtttagtccctgggagctttgagaggtctggttggttgatattattgttcttcctatggggttgcaaaccccctattcattcatgttcttctgaagttagaacctatgtattcagaggaatggacctctgtgatctatcaacaggtttgagtcaatgtggtctggtttgttgtttcaacaagttttatgcaaagtatctagttgcagagaatctgcgaaaactccgtcttcggctgcctcatgcctataggtaaacttgtgaaatactaaatactacacattaaataatacaaatttgacaacatcttcatttctatctgacattcaaataatatagtagcatgctatctattactgaagattccacagacataacaaaacattttattttccaagagtcagttataaaaacacccttgcatgttgtaactgatttttagagatagatactaactggccaaaagtaatctgtccctgccatgaacacaagatgttcattttgtgtatactcaagcaagcatccatatgtgcagtcattgacttttgtaatagccatgtttcctactgctaattgatgtgtagtaattaactagactttcattctgtcttgtttcaggggcattctgtgcactgagcaagtagagtaactgctagtaatttttgacaaagccacttatgaggtagaaacaaaatacacttcacagagagataaaaggcagtcatattgctgctaacaggtcccaggccacttccagtgaatttttgtttacagaaatgtattgttattccaaaaataataaaaaagcaaaagtattatgttgggattgacttcttagaagttcttgcattgcactctgaatatccctgctttgttctttaatgagatgtttgatttcatacaaatttattcagaaaatgtaaaggaaaattcaattcatgtgcatagtttttaatttgaagtcatttccagaaattgagcatgtatatctttagagcttaagggaaacaaacaaacaaacaaaaatcatgtatgtgtagactgttttaagtgcttcaaacactaagacagagacttaagtttttaagtagttttgcgatcttaattttaaacaagaaaatatattttatagttgggaaatagtgaatgtgaaaattattgaaaaaatacatcctagatgtagcacagagttattcaataaatgcatagacctcataattggtagacctgtaactatttcttcatctgcaagctaaagtaaattatttatatttcagaaggtaaaatattatataaataaaacatgaacatttttataatagggacagaaaccaatattattaattaataatataattctggtaagtgcttgattattcccagtaataattttgttttgcaactatttctaaaaggaaaacctcccttcaccaagaatttctctctatgtaaacatgagtatattaactcacccttcacccactcattacccattcagtctgaagaggaagacacttaggtatttgtttcatatgtactgcataaccaaactgaaatttcatctcagcaatgggactacataatttaacatagtatttaaacacaaaattgaatcattttaaaaatatacatgttaaaaatctcatgttatcaataagccatacaggtaataaactcaatctacatgtggctagcaatatttaagagagctagaataaatccatacaataaaagttggaaatggtatgttttaaaagagtgtacaaatataagtttttatttaattcttgaaaaaattcaataggtaaactattttgtattttagcctgtggagtcctaaagtatattagatattagatataaactaactgttactacagttcttctcttgcataaaataggcaatcttatttcataaaattaaacatgtaaataaacattagttaaatcagcatgtttctcaagacaaaaaagaactacagcagtattgtgtctttcagacctgagctaacacaatttcattgcctactctttaagacaatacaattacatttaaagataaaatagaaagcaatcattttgtaactgtgtaattaatatattttaattatttcctgagagattttaacaattttaccaataaactgaagtccattgaggctttcattctggcaattgcatatcagagtagatgtttttctataactaaggaaaaatgggcttagtattgtgaagtgtctgatcgatttgcaatggtagagaaaggggcatgatttatacttacatgttaattaaagttcacttgacacttttattcaaaacaggacttgcacttttaaaccagaataggacagagacatgaaaagtgctactctacatgataaaataggtaatatgtactggatgaaattcaaagatactaccaactctacaatatctgggtaatttctacttcataggtgacaagttctcatgagactgtttataagtgtatggatgttttcatactaagtatttgtatgtcctcttcggagatatgtgctaaaggaatttacaactcagagaatttcaaagatttaaataagctttataatattttgtcaatatttctgtgctccaatcatcagtgattcactttctgaagtgatctgaaaggaacagatgcagaaagtggagggtgtgtgtgtgttgctgggcatgtgtctttgtgtatctgtgtgtgtctgtgattctgtgtaagaggcgcggaaggaagaagggagggactgagagaaggaagaagtaagaagacagactatagaatatacaaaatgagctgattgcaactataagaagacaatatgtggaagaaaatatctaatgaagagcaaaagaaataatgatttaaataaattggtaatagtttcaatcatactggcagttactatttagtaaatatttgttgtatgccagatactttctattaagtatgagttgtatggtttttgtcaagtaatcctcataaaaataccaaaacacgataagtttgtgtgcattttataaataaccacgaaaaatgatgcttcaaacacagcaaataactcactgaaggccatacatctaataaatggcagtgctgggaacagagccaagattgatttagctccaaattatctcctttaaccaccagggtgaattgcaccaggcaaaggctttccatgtatcatctcattgacttattgtagcaatttagtcatgagttcttaacctctgtattttattagataaaaagattgaagttcagtgaggtcccatggacttatgtcagttcaccagtgagtgtgaggttttgaacctctgtctctgtcactcttcatcaatgaaaagttcaacttgatggaatagataagctgatgagggtgtgtagggcttgcaattcaatagaacaaaagaaggaaagtgagagttccccgtggccctcattgggtattccaacaggatccattgtagaaatgatacttttgaaagatcttaagaatttaaagcaagacaagttgtctccttatcttgtcatccctttgagatattctttacaacacaaaattggtttgggacatcttttccaagatctgtttgaggtccataacctcttatatctgaacaagaaaagataaatcacaaccatacaatgattagaaaaacaaatgaaagcaattctttgaggacctgtccatgaagtgaccagccgtctgaatacgctgaggaagcctgatgtcttgtggaagaagtaacataaacacctgctgaaaattccctctaatgtattcctctctgtaaccagagggatctttacaaagtgcatttggaatcctgatcttctttgtttccacagtttggtggttgcttcctgttgctgaaatgtaaacaggcagggatcatgtttatccagtctcttgtctgaccctgcattatttagatacagtctcaatgtgtggtgcctgcttgctccaatatatatcccatatactatttgagcaaaaatttatgtgcatatgtgtatatcgatgtatttagaagtgtgtcagtacatatttaaaagggagattcaagcatgtgcagaccagcgcttcatatcagatgtcttattatatcgactcttcactttcctttctgagacagtgtctctcgctcactggaatgttctagctacacagcttgctctgaaaatccgctgtcttgacattccagtcctgtaaactatcacaccattcatctgttgagacagattctggggatgtgtgctaaataattttctgtcaacttgacacaagttagagttatctgaaaggaaaaaaatcttaattgagaaaatgcctcagtaatattcagctgtggggtattgtgaagccaaacctactccattttggaacctgcctcatcttataaaagaaaaaaagaaagccggagaaattgacctgcagcaaaacccaagctgtatccacataccaggaaatactccatcccagcttgtccctggctagttactacctagctatttcctagcaacagttaatcaaagattagtctcaatgtttcagatgaactttcagactctttgtaattgtatatagtcttgtgttcagagcacctacctatctgcttacaatagacattcagttatatacctgctaggatagactcctctactacttccatttcccagaaaacctttaggagagcctgaattaagcttttaataaagagatcctaatgctattacatctaaaacgactcattggtggtcttgtggtgttctcaaatgcttcctggcacaacctattttcttagctaatgattgatgatggagggaccagcccattgtggatggtaccatcactgtttttgtggtcctgagttctataaggaagcaggtttagcaggccataatggacaagccagtgagaagcaatcctccatggcctttccatcccatactgccataaggttcttgctcagcttgatttcctgcttgcattattttctatgatgaacagttatatggaactatgagtgaaagaaaccattcttcattcatgggtgtttcatcacagaaatactaaccaaagacattatgcaaacccaggtcttcagaccccttcaaaccccttcatccagttatgccagcccctactaaacattattctaattcatttgttgacaatcagctgattaagatccttttactctactaagaacttgcatttagacaagaagtcacacttttagtgttggcgagcatggtctttactgcaccagaatcacatattatgtttagataagtggggaacatcatctcttctcacagtgcaacttaaaggcacttagcagacacttattcataccagttttggttccttgattggaattctagcatgcctcttatgattagtcttctttagctcatggctcacaagtccttggtttcaacctctgggtcatccttccttctccaaatgtgttccaattgtgtactggaatccacagtgcagcacccttgataaatctggtaattttaacacctaaatcttcttttcattttgtataattttggcatattaagtaagaattaatatcatttcttttattattattattaataaatttgtttacctcctgattgaagctccccctccctcattttattgcagtctctcttttacttcccctccctgaccatatatgcctcttccccttctcctcagaaaaggggaggtcccccacggatatcaatcagccctggtatgtcaagttgcagtaagagtaggcacatattattctattgaggctggacaaggcagcctagttaggggaaagagacctaaatgtggtcactgtagtcagagacaactctcactccctctttaggagtctcacataaaaacccagctctacaactgttacatatgtgcaaaggtcctagatccaccccatgcatgctctctggttggtaggtcagtctctatgagcccctatggtcccaagttagttgattctgtgggttatcttatggtgtccttaaccccactgtctccttcaatcctcctgcctgtcttccacagaattccccaaactgtacttaatgtttggccgtgggtctcttcatcagtttccatcagttgctggatgaagcctttctaataatagtaatattatgcacatgtctgcaaatatagcagaatatcattactagtattggggtgggatcattctcatggcatgggtctcaagctgggacagttattagttcacctttgcctcattttctgctccatctttcacccctgcacattttataagcatgacaattttttttaattaggcattttcttcatttagatttccaatgctatccaaaaaagtctcccatgccaccatcccccccccccccactcctatacctacccactcctacttcttggcactggctttccctgtactgaggcatataaattttgcaagaccaatgggcctctctttccaatgatggccgactagaccatcttctgatacatatgcagctagagacaagagcttcaggaggtactggttagttcatattgttgttccacctatagggttgcagttccctatagctccttggatactttctctagcgcctccattgggggccctgtgatccatccaatagctgactgtgagcatccacttctgtgtttgctaggccccattatagtctcacaagagacagctatatcagggttctttcagcaaacgcttgctagtgtatgcactggtgtcagcgtttggaggctgtttacgggatgggtccccaggtatggcaattcttaagtctacagttttatagctggtttgatgtcccagtccctccactggaaagcctagcctgtttacagacaatgtccagtttattctcattaacccctccccccttgctaggagtcttccctaacatctctttcatagattcctaggaatttccatttttgtatgtttctagctcatcgcagagatgcccctcaccccaacccatttgtctctctaattttctctcctgccagtctcctaccttatccctcctggtcctatatacctccctttgctttcccactcccccctcccatctctcaatgccttcattcacccctgatatctaattttaatctattttcccttctcagtgagattaaagcatccttcttgctccctccttgttatatagctttgggtctatggtttatagcatagtttatactgtactttatgacaaatatctacctgtgagtgagtacatgtcatgttttcttttgttctgagtctaggttttctcacttaggatgatcttttctatttccatccatttgcttaccaatttcaaaataacattatttttaatggctgagtaatactcaattttgtatgtatgtgtgtgtatgtgtgtgtgtgtatgtgtgtgtgtgtgtgtgtgtgtgtgtgtgtgtgtgtggagagagagagagagagagagagcaaattcaaaagagccaggtgcatgatcaaattatgcataagctgtattataaatacgcagtatagagaggctgtcttctctgcctttctattgcatccactgcacactgatggcttttcccttagacaaccaatagcagcatatcagtatactaattatattttactcagttaacaagactgcaatgaatatccacaaactataacattttagctacatagaaactctttcaccatttgtgataaaatattgttctgttcagctttgtattgaaatctagaatgctcttattgaatcaaaaatgatttcttctttgttttggtcactatcctattattttgaaaagacaccatgacaacagcaactcttataaaataaagcatataaatggagcttgcttacagtttccgaggtttagtctattatcatcagagcaggaaagcatggcagcagaaaggcacacatggaactagagaggtagctgagaattccacatctggatccttggaaagcaggaagagggatattggacctggcttgggcttatgaaacctcaaatctgaagcacactctcaatgacacacatcaaatagccacacctactccaaaatctcatgtcttccaatcccttccaagtagtgccactagttgatgactaagctttaaaatatgggagcctaagggatcgttcttattcaaatcaccacactctctcaaatgaaagtttatctgaaaacattaaaaattacaatattatatttagtcaatatcctatacagctttgcacagtaccacttgccaaggagtagagacaggaaaatgtctgttccacttgcttccaatccatgtgactatattttttcgcatcattcgcattttcagaagaaaacaatgggctataaaattgtcaggaatttatcatgttttcttcactcaaaaatgaatttaaatgttgaaaaacaaagggaattctgaggaaaataagatgtaccttgatcttgtaatgctaacaacttttaaagtatttatttaactatgaatcagtccttagtaagaacatgtcaatattgatccatgctgtatgtacactgtttaatcttttatttaagaatacagtgcatgaactacttaatttctcatagaattactttggtgacagaaccataattagttaagcattgcatgttctatttttttctcactttctatctttactgctgctggtttggagcagtgaagctttgtctccttcaagtaaattcttagaaacagaattactaattcaatggatatacttacttggagatgttttaacagatatatctaagccgccttcaagagagataaccgattttcctctgcctcactctgcatttatcaacgatatttttaaagcttagttagcttgatagaacaaaaacctttattgcttatttcaatttaacatctacaatttttaggaatcacagtaattatttgtgttgatgcttttgtaccttataataacacttgaacaatactaattacatcaaatacacactttgacaacattttcacatttattattccctaaaaatccttagcagccatggaagataaacactggagccagttattgttaaagcatgtcacagtgcatagcaattagtattcacaaatattcttccagtgtcgcatttaaagtggatttcttcattacttcagtagtgccttgccttctcacagttgatatattgaaagcagggatttattccttaagactaatcctttttcaataaaactgaaaagacattatttcattataaccagatgaggacataaaccagttgctgacaatgcagtgtgtttattttcagactacgctttctggccagacttccataatttcaatttatgtcgcattttgtagtgtggtattataaatgctgtgtgccctttaaatctcagcattatttttgtgaagtcttcagtacacctgtttatcttgttgcatataattactgtaatactaacacgttctccttttaaaaatatgatgaagttatggtcattcataaaatcaaactaactattttccttcctctggtcttcagctgcctctccaagctaacctttccttggcagcgtggtgttagtaatttagtactttatagttatatatttgtaacttaaacaccatgttaaacttaatactttgtgaaatattttgatgaattatgttcctgtaacattccttgttgcctgagagaatatttcacaggaaaggtataatgcagtgaaatgggtgttttaatgatgaccctgatgtatttcatggctacaattactcccaaccagacaatcaaaattctttgatatcacatgtctccttttcaataaatgaaatagaaatatttacttacaagaggtaaacagttataatgctgatatttaccaacattgcttttggattttttctagctcatctgtccataggtgatcatcatgtctatccttctcttatcttttaattttttccttttattgataattgattttttatcacataatatatcctcattatagttatcctgcatttatccttcctaatattttcccaccttcctttctctccagatccactccctttctgtatcttttgaaaacaaacaggctttaaatggatactataatatgatataatatgtattatatcataactataatacaatataaaagataaaatagaacaggaactaacacactggatttggataaaacaagcagaaagaaaagagctcaagagaaagcacaagaaatagagatccacatgtttctatacccaggagacccatagaaacttggagctggaaggctcctggtgagcactcacacagctggtaagcgtactgcctcagtctctgtgagctgatatgagcttcgctcatattgatttagaggaccttctttttcaaagatcctctatccagtttggctcttacactccctttttctggaaggtttcctaaacaccgaggatgggaatttgataccattcttactcttatcaccatttaatatgttcatcttaatatttatgcatctgcacaatttaaaaactctctatttaatttgtctttaaataaggaggtttacttctttgaatgtttttaaaactagattttatgtttaatcgatttgtttttcataaacgtttccttgtttcctattggagtttctttctgaatttgcaaacttgttgagtattcatgaaagttaggcaaagttactgtatttaaagtatgtaagtagtttttgatgtggagaagttttaataatatagactttcaaagcattattttctatcaaacctatggaagaagtccctatttccaagagtattatgttttgctctcattcattgtgtatgtatggttacaaggagatcaaatggtaacttgtgggagttacttctatctttgtactctgtgggttcaagagattcggttcaaattatagggcttctcaaaaatcatctttatttgttgacccatctcattgggccacttttattcatatagtgttttgcagtgttttgtcaattttttaatcttaagatttaattttaattatgacttgtcaagaaaaataccatgaaagcacagttcagtagatctaccaattatatttacaaatgtgcacacatctcagcaaatttatacctactttttctagtattattcatttaaccataaataactttaaattttcatttgttaaaatgacaccttattatgtacttatttttacagagtttgtctattgtaggaatctttaagtagttttttatctgtttgtaaattctgtgcttatcctaattattgtagtacctcaattaataattgttactcttacattttatacccagaggaacaaaataattcaacttcctctcaatattcatgtctattctcgtgttattttttatacaaagaataatgctttgctttaaaaatgaaaagacagcatttaaattaaaatattttaaattaaatcttgaggtgacagaggaagaatgcaatactgtttcctttggccacatgcccattggctgaggacggggataaataatttagatttttaacaacttgcttttgctaattgtttatcattttattcatttgtagctctttgtcattgatcagaggtaatggttctgcaatgaataacctaattctgtggaggaagttgaaagtcagaatttcatttggtaactttaagccttgcatgtgtcaagctgcacagctgctatagttgagattctcaaagaaaaaagaaagcctaatatgtatttattttttatttatcgcaaatcagagccatataacatagtgctcaccattccatctcataagtgtgagtttaattcatacgaattcactgaagtaattcgtattattaatcttggcatttatcttaaaattatagcctctaaatgcgagcaaaatcgtgaaaaattaaggaaaggaatgctacttgcactaaagagaacattgcaactttatgtaccaattaaagcctataatttcaatggaagactaatttgaaatttataataacctatgagaaatgctttgcagggcatagtgtctcaattctgcaatgtcagctcttggggacctgggacatgaggttaagacgtttaaagacagctcgcattagagagttgaagaatctgtttcaacagataaatattgataatgagaaggaaaaggaaagggaggggaagaatactgagagaaggaagaagtggaaccaaaaaaaaaaaaaagtttccagaaaatctccaaaataagaaatttgaaattcaatgtcccaaattaagaaggtggatttgaagtgcactcttttatacatgaaccactccaccaagtattacatatgctatgccagtttggtacatcatcttatttatttttctcataaagatccaggaatcacagctgaccatttgtggccttcatggccagcccagtggatttccagcttgttaaattctccatgtagtctggatggatctagtagttatataacctgtggttaggaagtagagggagagataagactcagaaagggaaacaagcatctgcccctctaggccctactacagacttctgacctcaatgctggtctccatgggggaaaaatagaaagtgacaattatgcaaattcaaatgtaaggttttgattaacacatcatagaaaccaagtatatatcacttgaagttactctaagtttgttgttattaaagacatatcaagcagactcctgaaaattgcctagatttgtgcaagaaaaaaaaggacattttatagactttaaacagaaaagttagaatatgagagatgaaaagcattctactcaggttcatatgaggttagtgacttttaaaagtgtccaaattctaattttaggacatcgattcagcaccaatcagtgtgttctgtacacaaattaacagaactatcttattcttaggaagtggtctttgtctccacatttatctatttggtgttaaggtggccttaaatcccacttttacccaagtacattttaaatacaaggctattgggtttagttagatatcatacacattactgaagtaagaaagaccctgggatttatgactttcaacttcaaaataaaatataaagagaaagaagtgaaaaagtaatagaaactggtgaacaagaatgagggtgattaaaatatattgtaaatgacacttctgggaaaagataagaggaaaccttatattaagacctataatccccagatgggggatatctgaatcccctggattctgtgagcaaaccaaggtcatctttggtacattctgcatacccagcctgtgtctaaagaatctgaggaaggataataatgactctctcagcagctgtaattttcatgctgccatcaatattaccactcattctcaatttatcatattatctctattttggtatcagtaatatccctaatttataaaaatgtcttcatgtttataaaggtactcttttacttaaatattaatgtacctatgaattagtaggcatttattgaatatcagttgaatgtgtatagggttttgtatctttccaaaatactaaagcagtaaaaaaaaaaatgggttagttaagggagatatgaaaatatgaccatactctagaggatttcacacttgaaatggccaaaagtcatagattgttttcactcatcttcattagttatgtatgtagacaaggaactggattaatgataacagtttccatgaggaggaagatttaaacaatgtacatgtctttcttcttcttctgataaacatcagagttatagcctaaaactctgtctgatattaaagttgataagaggtcaagccaaatatgtcacactatgggatggttcagaaacacttgcatacccttctaagagttccaaattaataacaagaagaaaaggaaatgtggccattaaagtaaatgtgtaactgtctcaatgaaataaaacctattaaaattatttacctataatacttccttcaagaggaaagaaatgaaaaatatttaattgtaaatgagtatgtaatataatatgatttcttcatgcacagattggatacattattttaaaaggtggtgattctagctctgtaggtaaatgcttaaggaactaaatacggcattggcttttgtggtacagagtctttacgtaaatgagcacatcatatagcaagagaccagtgacataggtgaggacatgtctcttctgagctttcaacttctaaacaactcctagggttaaatcacaagagctccagattgatgaccaaatcaagcctaatcaacttccaaagttcctccttcgtagcaagtagttagattaaatgtctttagaatgaggatggaatgtcaatgacaaagtcttagagaacaaatataactactctaaaacaatagcactggtagattagtgaaccaaacaagagtgtaaacacatctctcagaattgtcagttatttctttcaatcttagaagtgtaagtcatgcccagaagtataaatgaaataaggttcaaatggaataaaagaaagtttgatatatggattttattaggacttttaattcctaagaaagaaataagtaataaaataaaattttctggatttcacaatacctggttcagacttttaaaaatttgttatccaatgattttaagaaggtcaatgtctacaaaaggataaagactgtatattagtcacgaaaatgtgtggggagccgccctcacatttgccgttgcaagatggcgctgacatcctgtgttctaagtggtaaacaaataatctgctcatgtgccaagggtagttctccaccccatgtgctctgccttccccgtgacgacaactcggccgatgggctgcagccaatcagggagtgacacgtcctaggcggagaataattctccttaaaaagggacggggtttcaccattctctctcttgcttttgctcttgcactcttgcttttgctcttgcgctctggctcctaaagatgtaagcaatagagctcttgctctcttgcactcttgctcctgaagatgtaagcaataaagttttgccgcagaagattctggtttgttgcgttcttcctggccagtcgcgagaacgcgtgtaagaaaaatgcagttcatttcttaaacaaatatttgttgaccttgtactgtatgctaggcataattccccgtactaggtagatggccacaaacagcatgttgaacatctttatataggtttaaggaaaagtacttagaaattaaaggagcaatgagttctgtcctagagttgatgggcagtgtttatggaagctctttttcctgtaccttgataaaactagaagttatccaggttaggaagtactaagcaacagaaacactatgtgcagaaggtgaaatgaaggaggaagggactgaaacagcaaagtggcaatgcaatgggaattgacatgatgtcttgggaaatgaagacatagtaagtcatctgatctaaatttatacgtaaatgttatgttagctgaagaacagctcatgattttatgagcctatgtgtgtacatttctgctcctctcagatttctcttgggtacccaagtttatgaataaaacatattttacctggtatcaggcccctgcctcctcaattattaggtcatagctgtcataccctctaatgtatctgaatgtgtcaaagtcatagtgatgttttgctggctttagtcatcacactaatgaattagtgagagtaagtaagtacagcaatactggagcctaataggagactatttttcatcaggtatgtcagggtttctttcctaaatgggaattaattacaaaaaaattttgatgaaggaaacccttatgcaagcagaaaaaataataaagtaatgaaagattccacaggcaatatacaccctgttgtcataaatcagaattaaaggattttaagatatgtgcatgcatagaagtaatcatacaatttttattgaacatgtcacattttacatctaagataaagagatacataatgtagatgctttatctagtcagctgttggctttgatatttttgaaaatctactttaaaatgggttctaaaacacttgaatcttccttttagctcaccactcaccagaggcagtgaaaaagaaaacttaacagggtaaaggatgtggacctgtttagacaaatcagcagccatagctcaatccactagcaaacaccattcatgaatcagcaactgcagtttgatccagaagaaacctccaggctctgactattggcctgagtccagagaattggcaagatgctgcaggaatatcacacaagtactttggtgagtttctctctataaagacacaacaaacaatgatcagcaaagaaggcaagatgaaccaatatgacagcattgtcagctaaaatcagtaccagcaaaacccaaagaagaccatcaaagagtgcaagatgaatgaatgccacaatattgtccattggtccactgtctatagggctatacttaaactctttccaaacttcaagtgtcccctcaagcatgtgcaacagaaaaacactacatgccctttacccaggtaacttccagaacaaagctgcatctgttttcagcaaaacatcctcccacatttctgctacaacaaaacatcctctcctagacagtctccttaaaaacaccacatgacccaattgaagaaacgagacatttctacttcagtctcaatttttttttactatatctgtatttttattgaatattttatttatttgcatttcaaatgctatccctgttcccggttttcctgatagaaaccacctatcctattccctctttccctgcttctatgagggtgctcccacgtccacccactcactcccaactccccaccctggtcaagatgccatggtggtatacatgtctaatcctgcttaagatacaaatgagttatgtatattgacaaagacaccaaataaatcattcaacagtactccggttctcaaatatataatgttattcactcagctttttcatacttttttgctgttacagttctgagagcaggaatatcatattggaaattatggtggagccagaaggcaatcagcagcccacaataaaacagacgcaacctctcctcaggttcttttctgttgtttctgatacatacctcactaggcaatctaattttctctcaggaaaatttgtcacgaatctgttctttatcttgtctattcttaaaactttcagtggatagtgatataaacttttagtatatctaagattttaagatttttcattaactatgttagcattattaccatcagaatccgcacattaatctccatcattatcatcattttgtggattttttttttaatgtcaataggataggtcatgagaatatagatcacttaagaagcaggactttggtctctcgcttgtttgtggaaggaattcacagatgtgcagagtttgttatttttaataagcacccagagaagcatcactttagaggtcacatgatgtgggtttgttcttcatgtgacacctgccgctctgaattctccatgatgcgggtgcatttttttctgatgtcagtctggggatactttcacaactttgtttttctagtagccatatggagcttgtacatgcccagtctcaaggtttgacagagcatttcactggatggtagaagcagggacatgctgttcacctaagtgctgtcagttttggcattaacgtgtagagttgctgccaaggcttacataccattttctacactccagtaaggaagttcctctgccaaggccacttaaaatagcactttcagttatgcctagtacttcttaactctttggaggcaggcaaaaatttcatcatcttcagttaaaatgagtaaaccataataaatagtatagatatctactgaaaatggaaagatctgaaaacatgtgcagacagaaaacatgtgcagaggaacaaaaattatgtagataaatacacaaataagtgtaggtgcatgtatgtgcatctatatgcatataaatgagatgaaagtatttggatttaataaaagcacacagaaaaaaaaattcccattatcacaaactactggtagttgtttcagcatgtgttatgtgataggtagctttatgtgtaatagctggggtcagttaaaagtcagttttcttgtaaatcttactgtgattaagattttaacacacatatttgtgcacatgcacacacacaaccacatatacagacacacacagaggaattatatcattatatgaatctcttattttattacaacaatgagcatttaattaaagtatggattcagcatcatttttaacatcattgtcatttagggagcacctgttctatgcacatttttaaaagtttattctgaatcagttttaaccacaataaggctaagtggttaaattcccattttactaatgagaaaacaagaaccaaaaacttgatttattttttgtggccataaatattttaaatttaataaatatattttctttcaatattgaattaaaaactgtagaattaacgtttttaaataaacaaaactatgtgctcaaaaagtcaactgacaatttatttttcctgtctttctatcatcccttggcagtgttgcggtttagaagtatggcaaaactatttttaatttgtatgctgcatttggaaggtgtccaagaattcttctagttcaattctattatagtataagttcaagttgtgttagaaagaggttaactctcctgacagattccacatcttatttaagtagcaactgtagaagcagaagtcattcattctgattcattgcacaaagcagaagtgcaaaataaccttgaccttcaactctgtgctgagtaattctaccagtcctagaattgctaaagcagtggataaatttttatctgtgttgctacttttaaatgaagtatatactattataagtttatgtaaaatatctcatattataccaagtatataatactatatgacctataacattaaatttattttgttgctactttataactgtaattttgctactttttaaattgtaatatgaatttcagaaattcagcatacctgatacctatatgtgaaccctaaagaggtctcaacatacaggttgagtaacactgtcataaagtaagagttaaattataaagggatgttagagatatgaactgagttttcataagaatttaagtcctggcctagtgctttaagaaaaaaaatgttctataggtgtgtgcatatattctgacacacattcactattcaaacactttgagtagaacagggtccaaatatcaaatatttattttggtgatcttaagtgctaagagcatgaaaccatttcaggtaatatctgtagaaaaaaatatcttctctattgcatgtgtgcatcacctgtcaattgaaaagcctttgacctatggattaggcatgtaatgggaggtggtataccctctagatgaaagaattctgggatagagccaggtgcaggagatcaccccagaaagatgtgaggatatggagaaatggtaccatagcataggtatccatccacatgacagaatgtaggttaaaataaatagaatagcttatgtttctagacagattagagcctacctatatggccaaagtatttataaatatattttgagtgtgattcttatttctagaagcttggagctgagagaaataactggactctaacttgtacaaaatagcactccatgttgggggctgtatataaatgaattattattaatacaaatagcatcagtgaattaaactgttggctaaatttctttaagttatttcccagtaaccacacagattaaccaatgtttacttacaactgcccctcagtagctaagcaattaaatgatcaatctttactttccatgctaatctggctacctcccagatccatcccatgacacttgtatatttttattgacctggctctttaggccccttcttcaaggctccaatttctccaccctgccactgatctgagactctcaaccccccttctcccttcttcctctggttggcaggctcctaccctattctctattagctattgtctaatcagcatttattgacaaggatgggaataaacggtaagaatagtttacacaaacttgtgacaagagtttcttggtataaggattgcaatgctgtgtccatattgagtcatgacatgagggcagaaaaatcagcatttgactgacacaaaggtaaacctcacacagtgtacaaaaacatgaggtctacaaagatctatgactatggttcccccatacctgtcttttaacatagaaatttccatgtggtatagatatacattcaagggatgcaaataaggaacttaatcttcacaaagtcaatggtactatttcactgaaacttttggtgttataaattttatttttaggttatatagtgttcaaaggtctcttcatctacattttagtcttaatagatattctcatcataattggtagtaagtgccttttactcactggacacatcttgctatgccttaaaatgatcttactcttggttgatcctcattttgagtcaggtaattatttgtttaaagtgaactcaaagaattggacacataaacacactccctgtgagattctggacatattatgacatcaatgatagtcttaggaggaagctcagaatgtagagggcttgctttgcaaacatgaaaatctgagtctgagcctcatgatctacatatttaaaataataaaataaaggaaatggtgtatgtagtggtgcatgattttaattacagtacttaaaaaatgaagacaaattcccagagttcattgcacagagggcctgttgtacttgaaaaattgtctccaatgtttcaagagaccctatctcaattatatggtagagattgtctgtatcagcatttgggtgtacaattctctagtgtaaattctctaaaagggaacttaatagaatgacttatagaatgtcatcaaacttattcaacaatggatgattatgattggaagatccaagaataaagtagctgtttagttcatgtctgtggaggtctcaggttttctgcagaatactacagattccagaagacatctactctaatgtcagtgaagaaataaattgctaaagaaaactggaaagagaaagtgtttccttatccatgtgattatatgggcttctagcaaaaggcatggtcccccttagagatgtattttcccagatcaaaagatctggatgatagatgtgtcttcctacctcagtgaattaggtttgaactagatctatccacttcaaattaatcaaaattcctctttcatctgcctcttaatttttggttttaattattccagatatatttatattcaaaaataagagtagtcaccacaggatctgatgaattatacagtaatttggtctatgattctccccagttcacatagacaaacacacatgtacacattttcatgtacaccaatatcctcatgcacacacaatatatgaacacaaagagatgcacacacacatacatacacacagatgtgagactgtgtatgtacacacacatacacacaaacacaaatacacaaatgcaaattcacagaagaccatacttgcttcattgtgaacgtgagacttggatgaggaaaaagaagaatccaaaatatttggcaaaattggtgtgcagtctaaaaataatatacgtgatgatttataaataagaagtgagaggtttgttaattggcttcattaattatttcaaaatagattccaaagaaataaggcagacataggtagatgtttgtgagtttgaggctattatagtctacatagggaaatctaggccagccacatagggaaaccctgcttcagtgaaagagaaacaaataaacataacagactttaaattgcatgcatacttcttacacttttaattttttattttactcattttatcgtgcataatgtgtatgtgagtgtacacatgcaccatgagataggcatagaagtcagaggacaattttggggagttggttaaactccctccaaattaagttctagggaatgaaatcggattcttaggattgcatggtaaatacttttaccttctgagccttattgtggcctaaatgtacaacacctttatttgttaattttgccttcacgaaagtggaatttctgaatttattttcaaattgatgacatctaaggagaagagaagttacttatttatatagatcttcatggccaaaacgaatctatagactccaaagagatgaaaacagtcatttttcttctttttgataccctatgtttataatcatttaaaatatttgcactgctgtgtcacatgtgtgtcagcagatagcagagaggagaaaacctgtctggccagtgttctggcctatgaatatctgaaagattagtagccttaaagtccctattcttagctagtcagagacaacaaccaacctggacacagggggcctagagagggaaatgatagtcagtctggacaagcagacacagatgggctcctagggcaggaagcaagtaggaaactagaagaacttcacctggtggcaaggctaggaaatagtgagcaggagacaagggacacttgcaaggagtcacttgggcagtgaggagctaactctagagaaccacagaccatgatgcctggacacggagctatcctgagatgaataacagctcatctacaagcaaccttagggataggggggtccgactatgcttgagatgatccctgccaggcaccataatgggcattcagagaataacagttctgagaccatgcctgagatgactatagacactgggtgtcattaagaggaacaaataagtggtggaaaaatggaggagaaagagaaacaaaagaatgtgggaacaatgaccagaggcagaactggagacttgagggtagtgaggggcagtctattgtgagtaaccagtgataccaccagggatcagagaaggttcctggcttgtgctgcccctagggccatgtctggatccttggccatgtagcagcagagagatgcttggatgccacctgacagtcaagttgtaatactccttagagtgagcccctcacatgggagatacaagtgagctgtcctcaagaatgtgaacatgggaactggcatactcatctccttatggtggggtagacccctttactcctcataacctgctgcaggtaggagacctggccctagggtcctgagagcaggagagctgatcccgccttgcatcagctgcaacagtcaagagactggtagtttacctggtgacaggggcactggccaattggctacaagagcacaggcttagaatagctggtccttccacttttctggcctttgtgacatggaggaaggagggaggtccccctcttgctccctgcacctatgtcaggctgaagagctggccccaacggggtcatgagaggagaactgaccctttactttacctgggaagcatggcagaactgaccctctgttgcagtggatgttggtaagttgacaatgaggataagagagctagcatgcagaccatctcagataattctcaggtgcgtatccaggtcgttgaattagcccaccttaataactatcccatcaatgaactgctggaatgaatgaaggaactggtcttaatagattaataactttaggatctctacaacatagggcagcaacaggatatccaagaagggtcccagtattgatagagtagcaaaagccagaagcctagtaccagaccaatgagtaactgcaatgcacatttgcaagtaaagaagggaatactgtgggtcatactgtgatacactacagcttccacaaaaagagttttttcctctgttggtggagaggttgcaagggatgagggtgggtaagaagggagaggaatatgagtggaattcacaaagaactaatgtcaaaaatatatacatgtttatactggtaattttaattcaagtgatatgccaatgtcttcttttccaatgtaatgttatctccattagcaagtattggatttccttcctagcagagagcctaagagattttgttgttgttcagtttaaaccatacactgagtaacatcaggaaggtaacaaacaaggtcacctggctgtgtgtggtcctgtgtacagctgtcggtattgacctgccaacagtcttataacgtcttgtttctttcaaaggtatttcagcaacatcttcatcagtctggagcatccaaatatggaaatattctaacatgtattattgtaacatatgggaaatttcttttgatacacactattatttcattgtatgtgaccaagttatttatgtttactatatatatatcatctgagctacttggtcattctaataagacagttattgttttcaatattatataaatggtatataggaagtttgtaagtttcttcaagccaaaaagcaaaggttcaaatatatgataggtttgcaaataatctgcacttaaaactaccaccactaaactgctttttaaagtactttgtgagacagtgagatgtgtaatatctgctcagtaattctttactattttaaagggagaatatagtatacctttccagaggaggaagaaattcttacttcatgtattataaatgtatcctctttattgatgcatataatttaccagctgattatatttttgtggttcaaactttgattgcttcttttacttgctcggtatataacaaagtctgatttatgtcacctgtaaaatagggaaatacaaaattacctttgcataaatgagacaatttacacaaagcccccaaggggctacagagtatataaatatcagcatgcatgaatttctttctttagataccattgctattctgatttgaaatgcaagtttcttaaatgatcctaaagtgcttcctaaaaaattatattttgcaaattatttgttccttttttaattttcaggaatatatatgcattttgtacagaatataaaaattatggagtagaaagacataaaaatatcagtttatctgttgccagaaaacagatgcaatagtcattccaagtgatttagcaaggtatagagcaatttagaaattttcctagataccctatagtggaaataagcagcttattctatggagaaagtacagattgatagctggaacctagagagagctgcttagggaacaagctgcccatcgcaaagcttgaccttcagtagcagaaaacaaaagtcataannnnnnnnnnnnnnnnnnnntggttgtacaagcctgcaattccaccaacaatggaaggagtgttcctctttctccacatcctcgccagcatctgctgtcacctgaatttttgatcttagccattctcactggtgtgaggtggaatctcagggttgttttgatttgcatttccctgatgattaaggatgttgaacattttttcaggtgcttctctgccattcggtattcctcaggtgagaattctttgttcagttctgagccccattttttaagggggttatttgattttctggagtccaccttcttgagttctttatatatgttagatattagtcccctatctgatttaggataggtaaagatcctttcccaatatgttggtggtctttttgtcttattgatggtgtcttttgccttgtagaagctttgcaactttatgaggtcccatttatcgattcttgatcttacagcacaagccattgctgttctattcaggaatttttcccctgtacccatatcttcgagggttttccctactttctcctctataagtttcagtgtctctggttttatgtggagttccataatccacttaggtttaacctcaatacaaggagctaggaatggatcaattcacattcttgatacatgatgactgccagttgtgccagcaccatttgttgaaaatgctgtctattttccactggatggttttagctcccttgtcaaatatcaagtgaccataggtgtatgggctcatctctgtctcttcaattcagttccattggtctacttgtctgttgctataccagcaccatgcaatttttattacaattgctctgtagtacagctttaggtcaggcatggtgattccaccagaggttcttttatgcttgagaagagtttttgttatcctaggtttttttttttttattctagataaatctgctgattgccctttctaatttgttgaagaattgagttggaattttgattgggattgcactgaatctgtagattgcttttggcaagatagccatttttactatattgatcctgctagtccatgaacatgggagatctttccatcttctgagatcttgtttaatttctttcttcagagacttgaagttcttatcatacagatctttcacttccctagatagagtcacgccaaggtattttattttatttgtgactattgagaagggttttgtttccttaatttctttctcagcctgtttatcctttgtgtacagaatggccattgacttgtttgagttaattttatatccagatacttcattgaatctgtttatcagatttcggagttctctggtagaattgttagggtcacttatatatactatcatatcatctgcaaaaagtgatattttgacttcttcctttccaatttgtacccacttgatctccttttgttgtgctaattgctctggctaggacttcaagtataatgttgaatcggtagggagagagtagacagcnnnnnnnnnnnnnnnnnnnntatatttttgtggttcaaactttgattgcttcttttacttgctcggtatataacaaagtctgatttatgtcacctgtaaaatagggaaatacaaaattacctttgcataaatgagacaatttacacaaagcccccaaggggctacagagtatataaatatcagcatgcatgaatttctttctttagataccattgctattctaatttgaaatgcaagtttcttaaatgatcctaaagtgcttcctaaaaaattatattttgcaaattatttgttccttttttaattttcaggaatatatatgcattttgtacagaatataaaaattatggagtagaaagacattaaaatatcagtttatctgttgccagaaaacagatgcaatagtcattccaagtgatttagcaaggtatagagcaatttagaaattttctagataccctatagtggaaataagcagcttatctatggagaaagtacagattgatagctggaacctagagagagctgcttagggaacaagctgcccatcgcaaagcttgaccttcagtagcagaaaacaaaagtcataattcttcaacagaagaataagggaatcaattctctgatttcatcctgctacagattcttgaaactccttttcatgctttccattggtaccccaaaagataccagagatcaaaatactcaggtataggcaatattgaatgtcagccctctaggactgacaatgagatgaacaaaattaaagagtagttatatggagaataatagaaaacagtatttagaataattttctctttctatctgggagtaccactttccatgtaaacgctcttagatattcaactttgattcatgaagatcagattcagaagttaccatgctattatcttgaaatgcattagaaaattattcttaagacactactttggttaagcagctgttactgtgtggagggttgaatgagaatggcctgattgtctcatatatttgaatgcttggtttgcagttggtgaaattgtttggaaagtattaggtattgccatgtggatggagatatatcatgttcagatgggctttgaggtttcaaaagcacatagagtttcctgcgtatgatctctctctctctctctctctctctctctctctctctctctcctcacacacacacacacacacacacacacacacacacacacatatgcttgataatcagacataagttcatagctgtctacctgctgtcatgcttcctgccataatggttatgaacactaaacttatataactgtgagcctgcaaattcaaagttttcttttgtatgttgctttagtcacagtatctccttacagcaatagaaaggtaactaacatagaggttggtaataggggtgacatatgattgtacaaagcctgcaattccagttttctttgtttgtttgcttgcttgcttttggagaaacttagaagactgtgtctttggactagataggaaggtagtagaaagctgtaagtgggtattaatcagctatcctagtaggatcttggagaacaaatgtgctgaaagttctctggaacttgttggcccacctgaagagtttttgaggagacgaacattagcaattggattagagaccattcttgtcatgttgttctaagattctgcctgaggctaaaatgaagacttttgtttgtttgtttatttggggggggtgtttttgtttttgtttttggtagagatttgacaaccatctactattgactctgtcccttactttatagtgaccactcatatacagatcaatgaaaaagaccagatagggcataaagatacagtaaatgatcacactacaataaagtatttggaccacacttgatactgaaaagagatagtgagaattggtttaaagacagtggagtctttagggcaagacttcactcagctaatcctgcactttttgaaaatataaggcccaaggaattttctgatcctaaagagaaacaagacaaagtttgtgcaaatttaatgaaagaaggggccaaattccatcctaagcaaagagcaaaacttggcagtgatgggaatgtagttctagctttagaattatataggatacaagaaccaaggtatataggaacttcctccatgtttaaaaaaatccactgaggccaggcctgtagcaaggcaatccatgtttggaggtttagagaaatcttacatgaaactgtgaaggtggtgtctggatttcactggcaacccaatgtcagatctgtgggatgtctgccaaagacagctgtgtcaaggtatgacacaggctaaagaaacagaggcatgtggctgtctgtgacactgaaagggaaggttaatctcagaccctggagatcagacttggagataacaggattttcacttttctctgatgcattttattttcaatttgcttcagtattccctcattaagtctccttaccttcacttttagaatggtaacgtgcattctgttcatttatatgttggaagcaaataatttgatttttacattatggggagttacaactgaaagatctatgtgagtttcagaacagaattaaggctttagacttttaaattgtgttgagactgtgaaagactatcaggacttttgaagttggcctaaatgtgttttgagttatgatgcatctacaaacctatggaggccaggaaatgatataatgtagttagaatgagaatacccccctctccacataggctcatatgcttgaagcttgcttcagagttggtggaattatttgggaaggatgaaaatgtgtggccttgtcagtggagataagtttgaggattcaaaagttcctactttttccatttagtgctccctgtccctgtcttatacttaagactcaggtacaagttttctgccatcttgctagcttccttcctgctgtcccgctcccagccatgaactctaaccctaggatttctttaatgtgttgtttatacctatgcgtcacccagtttatctcaaaatctacattttaaccacatatttatagaaatatacatattaacatttatattttgtcactattttcagtatttaacacattaaataaatctcaggatggtcaccaatatgcatcagtgtttcaagacggaatgagaacagacaactcttcttcatatacattgaacaaaagtgaggccaaatttgaattttccattaatcttactgtattatttgactatcttcagtttggggttactggattatacgtagttgtctgttgtgtatgtgtgtctgattattttcccatgtctcatacttgttctacacaaaaggctttgctctgtatttattgcctatcacaaaaattagagagaatgaaaattttaatctatctatctatctatctatctatctatctatctatctatcatctagagtgatttatttctttatctaggaagagttatttccatacatattctttaaaagagtaaaggatagaatttgaactcatgatctacggaaaagcagtcggtactcttaactgctgagccatctcccagcaaccacatggtgggtggctcacaaacaggcctggagcaagagggagaaaaggaagggggggaagagtaaaggttaatttaatttactgagcacaactagccaagaatggtactcaaaaccacacacaaatgttactactccttacatacatgttgcttttaacattattggaatttttgtttgtttgtttgtttgtttgtttaaggcatcttttatctgttgtgtgcaattagccaaagatttaccataacacacacacacacacaaacatatgcacacacacacatcattccaggttctggacatagaaaagtttatgattttaaataaatctgattacatagggaatacaccacatagttaacttgattacattactcacttaaatgctggttaaatttatcgagtctaaatacaaggtatggccataagtaaagtgaattgtttgacattatctgaaggcatataatttaacatctggttctcacttgatggtggtgttggaggagccttaagaggtttgacgcattgacttaaaaatccaggcaacctccatcactcaaaatttactctttctccattgtgctgctggttcaagagggaagctcccagtgtcctgtgcctgccacgatgcttgctgcctgctgccatgctgccccagccatattgactctgcttctctaaaacaatacaacaaaataaaaccctcccttttcttttttaaaaataagcgaacatgctcataagattttatcttagcaacagaaaggtaactaatccagatggcattgggagacgattgaagagaacatgggttttaagcaaccttatgcatagatccaacaccttggccatgatcttgtaaaaatcctgagcagaagattgaagtgaagagaatctgagacttttgaccttcagaatcagtgagattatgtgtgtgtgtgtgtgtgtgtgtgtgtgtgtgtgtgtgtgtatttgtgtgtgcattgtttacagctaaaaattatgttctaattttttatatagcaagagaaactaatgaactttctcacacttttccattagaagataaccttttccagttattttgtttcccagactcaaggtgctttggattcagacaagcagtgaagtggctcaaacatagtctggatgtcaaaatgaaagtgatactattcatgagctttgtctgagaagacaactcttctgtttttaagattgtgtgcatttcataaaccaggcttttgaaaagcaatctctatgtgtcattgcattataaatatttccagattaaagaataattcagagttgaggaatttaacgggcaagatagaggttgttcaggagttacatgcttaatttactcccttgggtatgcactgccgagaaagctaaagtgtttcctttatatggaggaacttaagagctactcctttctctgtcccaggagcaacagagttgagaacttaagtaacgttagaaaaaaaattgtatcttttcttgctttaaatatcactttcatttgcaaatacatagtccacatagttatgtattgcctatagatgcatgggtaaaggtcgcagagagagagagagagagagagagaaagagagagagacagacagacagacagagacagagacagacagagacagacagagagacagagagaagatatgaagatagaaaaatgttgaaccatagaaatgaagaagagagaagaaggaaggattggggatagattgtatcaatgcatattaattatatccatgtacaaaattctcaataaaaataattataatttcacaaattcagaaaatatttgaataaccattaaatatgctatttaagacttgcttttttaaaaagaattttactagttatatacttataaatgaggatattagaaaaatatgggaacaggtatgcatcccctgaagtgtttggctagaggttatctcatcgacaaccagaatttcatgagaaaagcaagtttgcaattgtgctatgttgaatgttagccattagaaggtgatgccttcatgtgcagagatattgtaaaagaaagtgagtactttatttaataactacacaaagaccaacgttgtgtgtccaagtactgtggataggagaagcagaaataattaaattaaaaatcacaattttgtaaatagctttaccttcttcaatttaattactgttgaaacagaatcttaattttatttatttataaatatttatacattttatcccctcaatctatatttattgaaaacattacaggatatttctgcacatgtttctctatgtttatatttgctttcatgtttatggggacttattcaggtgtgtcttaaacacctaagtctgggggtgatgctaggctaacgaaggcatctgcaattgctccccacctcattcgctgaggggtaatctctcaattgaacctacaacacccctacttagataatttcgctagtcagtttgtctttgggactccagtctctgcgttgcaagcaccatgattgtaagtgtagtgctgcagttttacatgggttttgaagaccaaagttgcagacctcatacttccatagccaacactaaccactaccatttcccttgcccataaaacatttgccacaaaattaagaataaggaaaataaatactttctatatagttttgacatactataaatttcagtgtgtgtgtgtaaaatctaaatgtcgttcccagtcaagtatcctacacaggatgtgtgcattgtaagcacacattaaatatatccattttacttacaaattattgaagcagaaacaaaactcctagattctaaaattattctaacacctttgcttaaaatgcatattcaagggtctggcaagatagcaaagtgaactaagttacttaccaactaaccatgagtacctgagtttgaacattcaaacctctgtgtcaagtggacagaataacttcctacaagttgtttcttacttccacaagcaatgttgagtgcatgtgagcatgtgaaaatacatgcattctcatgcacaatatctctaaacatgaaaataaattagaaatttggcacttttgaattcttagaattacaggttagcccagaggagaggatgacttatggaaccaagtggttgttattgaaggatgtgaagaagttccatttgttttttttgttttttgttttttttttttttttttgatggcttgcaacaaagtaagtttattccatcaaagttctttttttttttaattttttttaattaggtnnnnnnnnnnnnnnnnnnnnatgcgtttagcaaattggtttcttatatcttgggtatcaagaagtttctgggctaatatccacttatcagtgagtacatatcatttgagttcttttctgattgggttacctcactcaggatgatgccctcaaaggtccatccatttgcctaggaatttcataaaatcattctttttaatagctgagtagtactccattgtataaatgtaccacattttctgtatccattcctctgttgaggagcatctgggttctttcctgcttctggctattataaataaggctgctatgaacatagtggagcatgtgtccttcttaccggttggaacatcttctggatatttgcccaggagaggtattgcgggatcctccattagtactatgtccaattttctgaggaaccgccagactgatttccagagtggttgtacaagcttgcaatcccaacaacaatggaggagtgttcctctttctccacatccttgccagcatctgctgtcacctgaatttttgatctttgccattctgaatgttgtgaggtggaatctcagggttattttgatttgcatttccctgatgattaaggatgttgaccattttttcaggtgtttctctgccatttggtattcctcggatgagaaatctttgttcagctctgagccccattttttaatggggttatttgattttctgggagtccaccttcttgagttctttatatatgttagatattggtcccctatctgatttaggataggtaaagatcctttcccaatatgttggtggtctttttgtcttattgatggtgtcttttgccttgtagaagctttgcaactttatgaggtcccatttatcgattcttgatcttacagcacaagccattgctgttctattcaggaatttttcccctgtacccatatcttcgaagggttttccctactttctcctctataagtttcagtgtctctggttttatgggggagttccataatccacttaggtttaacctcaatacaagggagctagggaatgggatcaattcacattcttgatacatgatgactgccagttgtgccagcaccatttgttgaaaannnnnnnnnnnnnnnnnnnnttccctttctttactaattagagagttataagacagaaaaaaattcctccatttttatttaattgctgcttcaaaggcttgagataatgcagacagagcaaaattactctatagagtgtttaaatataggataagtctgtttgtcattttctcagtagtatatttttttctgcctctagggttttcttttagctcctcaaaagtgagatgagggtattttacaatttgaaaaaacattaacttcaggactgatttgtttagtttctctatggatgtggatagctacttaaaatcttgaaattcacttttcacatccctaacgtgtgtagtgggtatggacaagttgttaactattacacattttacaacattacgtcctagagataatgaaagttttggaagaccttagaaaaatgaaaacaaccaaggaaatgtatatatgtttgtaaatattagagaaagaatttttgatattaatgatgctttcagtcagaaccctaatggagttttttttttaataaacaaatcaaacagaaacaaaataagcaattttattattatgaatagtattgaagataaattgattattaatatattcttcttgtctttttaattgattctagcactcggtttccttttctaatgaatttcagtccctctcaattaaggggacagattgtaatcaagcacatatagtaaccattccgaaatttcctgtacggttataatttcctgcatcctttgacaaagtacaataattttattctgagtcatcaggtatgaaacttcataaaacctctttttaaaatatttttattaggtattttccacatttacatttccaatgctatcccaaaagtccccccacacacacacacacccctacccacccactcccactttttggcactggcattcccctgtactggggcatataaagtttgtaagtccaatggacctctctttccaatgatggccaactaagccatcttttgatacatatgagctagagtcaagagctccgggttcttgttagttcataatgatgtttcaccgatagggttgcagatccctttagctccttgggtactttctctaggtcctacattgtgggccctatgatccatccaatagctgactgtgagcatccacttatgtgtttgctaggccccggcataatctcacaagagacagctatatcagggtcctaacaacaaaatcttgctagtgtatgcaatggtgtcagcgtttggaagctgattatgagatggatcccaggatatggcagtctctagatggtccatccttttgtcatagctccaaactttgtctctgtaactccttcgatgggtgttttgttcccaatgataagaaggggcaagatgtccacaccgtggtcttcattcttcttgagtttcatgcgtttagcaaattgtatcttatatcttgggtatcatgagtttctgggctaatatccacttatcagtgagtacatatcatttgagttcttttgtgattgggttacctctgttgaggggcatctgggttctttccagcttctggctattataaataaggctgctatgaacatagtggagcatgtgtccttcttaccggttggaacatcttctggatatatgcccaggagaggtattgcgggatcctccagtagtactatgtccaattttctgaggaaccgccagactgatttccagagtggttgtacaagcttgcaatcccaacaacaatggaggagtgttcctctttctccacatccttgccagcatctgctgtcacctgaatttttgatctttgccgttctgattggtgtgaggtggaatctcaggattgttttgatttgcatttccctgatgattaaggatgttgaccattttttcacgtgtttctctgccatttggtattccttggatgagaaatctttgttcagctctgagccccattttttaatggggttatttgattttctggagtccaccgtcttgagttctttatatatgttagatattggtcccctatctgatttaggataggtaaagatcatttcccaatatgttggtggtctttttgtcttattgatggtgtcttttgccttgtagaagctttgcaactttatgaggtcccatttatcgattcttgatcttaaagcacaagccattgctgttctattcaggaatttttcccctgtacccatatctacgagggttttccctactttctcctctataagtttcagtgtctctggttttatgtggagttccataatccatttaggtttaacctcaatacaaggagctaggaatggatcaattcacattcttgatacatgatgcctgccagttgtgccagcacnnnnnnnnnnnnnnnnnnnnccatttggtattccttggatgagaaatctttgttcagctctgagccccattttttaatggggttatttgattttctggagtccaccgtcttgagttctttatatatgttagatattggtcccctatctgatttaggataggtaaagatcatttcccaatatgttggtggtctttttgtcttattgatggtgtcttttgccttgtagaagctttgcaactttatgaggtcccatttatcgattcttgatcttaaagcacaagccattgctgttctattcaggaatttttcccctgtacccatatctacgagggttttccctactttctcctctataagtttcagtgtctctggttttatgtggagttccataatccatttaggtttaacctcaatacaaggagctaggaatggatcaattcacattcttgatacatgatgcctgccagttgtgccagcaccatttgttgaaaatgctgtctgttttccactggatggttttagctcccgtgtcaaatatcaagtgaccataggtgtatgggctcatctctgtgtcttcaattcagttccattggtctacttgtctgtttctataccagcaccatgcagtttttattacaattgctctgtagtacagctttaggtcaggcatggtgattccaccagaggttcttttatccttgagaagagtttttgttatcctagtttttttttttattctagataaatctgctgattgccctttctaatttgttgaagaattgagttggaattttgattgggattgcactgaatctgtagattgcttttggcaagatagccatttttactatattgatcctgccagtccatgaacatgggagatctttccatcgtctgagatcttgtttaatttctttcttcagagacttgaagttcttatcatacagatctttcacttccctagttagagtcacgccaaggtattttattttatttgtgactattgagaaggattttgtttccttaatttctttctnnnnnnnnnnnnnnnnnnnnaagatagccatttttactatattgatcctgccagtccatgaacatgggagatctttccatcgtctgagatcttgtttaatttctttcttcagagacttgaagttcttatcatacagatctttcacttccctagttagagtcacgccaaggtattttattttatttgtgactattgagaaggattttgtttccttaatttctttctcagcctgtttatcctttgtgtacagaatggccattgacttgtttgagttaattttatatccagctacttcattgaatctgtttatcaggtttcggagttctctggtagaattgttagggtcacttatatatatactatcatatcatctgcaaaaagtgatattttgacttcttcctttccaatttgtacccacttgatctccttttgttgtctaattgctctggctaggacttcaagtataatgttgaatcggtagggagagagtagacagccttgtctagtccctgattttagtgggattgcttccagcttctcaccatttactttgatgttggctactggtttgctgtagattgcatttatcatggttaagtatggaccttgaattcctgatctttccaagacttttaacatgaatgggtgttggattttgtcaaatgatttctctgcctctaacgagatgatcatgtggtttttgtcttttgagtttgtttatgtactggattacattgatggatttctgtatattgaaccattgctgcatctctgggatgaaacctacttggtcaggatggattattgttttgatgtgttcttggattccgttagagagaactttattgaggatttttgcatcgatattcatagggaaattggtctaaagatctctacctttgttgggtctttttgtggtttaggtgtcagtgtaattgtggcttcatagaatgaattgggttgagtaccttctgttttattttgtggaatagtttgtgaagaactgggattagatcttctttgaatatctgatagaactctgcactaaaacccatctggtcctgggatttttttggttgggagactattaatgactacttctatttctttaggggatataggactgtttaaatcattaacctgatcttgatttaactttggtacctggtatctgtctagaaacttgtccatttcatccaggttctccagttttgttgagtatagccttttgtagaaggatctgatagtgttttggatttcttcatgatctgttgttatgtctcctttttcatttctgattttgttaattaggatgctttccctgtgcactctagtgagtctggctaagggtttatctatcttatagattttctcaaagaaccagctccttgattggttgattctttgaaaagttcttcttgtttccacttggttgatttcagcctcaagttttattatttcctgctgtctactactcttgggtgaatttgcttccttttgtcctagagcttttaggtgtgttgtcaagctgctaatgtgtgctctctcaagtttttttatggagggactcagatctatgagttttcctcttagaaatgtgttcattgtgtcccataagtttggatatgttgtggcttcattttcattaaattccaaaaagtccttaatttctttctttattccttccttgaccaaggtatcattgagaagaattttgttcagtttccacgtgaatattggcattctattatttattttgttgttgaagataagccttagtccgtggtgatctgataggatgcatgggacaatttcaatatttttgtatatgttgaggcttgttttgtgattaattatatggtcagttttggagaagataccatgaggtgccgagaagaaggtaaaaccttttgtttaggacaaaatgttctgtacatatctgttagatccatttgtttcataacttctgttagttttactgtgtccttgtttagtttctgtttccatgatctgtccattggtgaaagtggtgtgttgaagtctcccactattattgtgtgaggtgcaatatctgctttgagctttactaaagtttctttaatgaatgtggttgcccttgtatttggaacatagatattcagaattgatagttcctcttggaggattttgcctttgatgagtatgaagtgtcccttcttgtcttttttgatgactttgggttggaagttgattttattagatattagaatggctactccagcttgtttcttcagaccatttgcttggaaaattgttttccagcctttcattctgaggtagtgtctatctttttctctgagatgagtttcctgtaagcagcaaaatgttgggtcctgtttgtttggccagtctgctagtctatgtatttttattggggagttgagtccattgatattaagagatattaaggaaaagcaattgttgcttcctattattatttttttgttaatgttggcattctgttcttgtggctgtcttcttttaggtttgttgagggattaccttcttgcttttgctttttctagggcttggttcctgtccttgtttggtttttttgtttttttgttttttttctattattatcttttgaagggctggattcatggaaaagaaaaatgtgtgaatttggttttgttttggaatactttggtttctccatctatggtaattgagagtttggctgggtatagtagcctgggctggcatttgtattctcttagtgtctgtataacgtctgtccannnnnnnnnnnnnnnnnnnnagggcttgattcccggccctgtttttttttttttttttttttttttttttctattattatcctttgaagggctggattcatggaaaaaaaaatgtgtcaatttggttttgttgtggaatactttgttttctccatctatggtaattgagagtttggctgggtatagtagcctgggctggcatttgtattctcttagtgtctgtataacatctgtccaggctcttctggctttcatagtctctggtgaaaaatctggtgtaattctgataggcttgcctttatatgttacttgaccttttccccttactgcttttaatattttacctttatttagtgcatttgttgttctgattattatgtgtcgggaggaatttcttttctggtccagtctatttggagttctgtaggcttcttgtatggtatgttcatgggcatctctttctttaggtttgggaagttttcttctctaattttgttgaagatatttgtggtcctttgagttgaaaatcttcattctcatccactcctattatcagtaggtttggtcttctaattgtgtcctggatttccaggatgttttgagttaggatctttttgcattttccattttctttgattgttgtgccgatgttctctgtggaatcttctgcacctgagattctctcttccatctcttgtattctgttgctgatgctcgaatctatggttccagatttctttcctagactttctatctccagctctttattgtgtttacttccctttttaggtcttggatggttttattcaattccatcacctgtttggttgtgttttcctgcaattctttaagggatttttgtgcttcctctttaatgtcttctacctgcttagcagtattctcctgtatttctttaagtgagttattaaagtccttcttgatgtcctctaccatcatcatgagatatgcttttaaatctgggtctagcttttcgagtgtgttggggttccctggactgggcgatgtgggagtgctgggttctgatgatggtgagtggtcttggtttctgttagtaagattcttatgtttacctttcgccatctggtattctgtggagttagttgttatagttgtctctgtttagagatttttcctctggtgattctgttaccctctatcagcagaccttggagactagatctctcctctgagtttcagtggtcagagctctctctgtaggcaagctctcctcttacagggaaggtgcacagatatctggcattgggacctccctcttggccgaaatgaaggcccaaaacaggatccttcccagaggctgtgttgctttggccttttacagaagatgttagcttctgtagtacacactctcacctgtacagactactttcggcagagtcccggaaccaagatggctcctgtagatgctgagggaaagccctccttggctgggtggacacctgtcctctggctgggaaggtggccggatgtctggagcccgaaaaggaagcttcctcagaagctctgtggctccagcatgtcccagaagctgttagcttctgtagtgcacactctcacctatgcagactactttcagtggagtcccggaatcaagatcaaaacctttttcttaactgagtacaagatgtacttttatgtatataaaaattataaaatatgtagtacaataggcattaacattgcccatgtttgatctttcttcagaacttggtggattctgagaagaaatgtgccacatattaagacaatgttataactaacaatgctgcatttatgccaaacacttataaaaagaattagaatttataatacatgctagcaatactggagcctggggccagtttttcattcatagaaatggagtagtctatggttgaaaactttgaagatagctctttgcggaaaagtgcactgagaatagtgtatgaggaacatacatgagaagtcatgatcaacacctatgtatggggatggcatattgggtcaacaactaaagtttgtgaaaagggttaatagggaacagtggtttgatgggtttagcaagaaagaggagaaaatacgggtgaggataattggaatgcactgtatatgtgtttggaattgttaacacatataattatagaaaaaaggctagggccaaatgtttctgaaaatggctccataactcctatgactctctgttcctgaatggtagagaacaattgtcttttctggattgaataaataactctttacattctgattattggagaagtataagccagtgtcagcatgaagcatccctaagggtgctggttgttgttgtagctttgttattgcataaaacagagagctctatagtttggtttgagaacttaccatgtgactaatctaaccaagtatgatgtgccctaatagtagtggtggatgctttaaacaggaaacaaatataagcaaagattgtcattaatttaatttaattttttccttctctttcttctttttctatacatttacataccaagtaggtcatgcacgttatttgaggggtacttctccatcatgaattataacttgtattagttttaaacatttgcataagaaaattaaaaatgccatgtgtagtttgttgttcatcctgttaggaaacatatatgtcaggtttgaccggtattcatggatgtaagcattactattttggtactttaggctctttaacttcggaaaaggtctttatgcagagcttgtagtaatggaggagtggttattatcaaaagcttagcatcaattcctttctgaaattttgagttcatctggggacttgaaatattattgttctataatactatttccatatatagactgagtttcttctaagaaacctgagcattaaaatgcattgttaaaatgaaaagcatagtgtgtatggagagaatactttattgccttattcagactaatttttgtcatgaaggctcgttgaagcagcccactggaggcacgcatgtgggtgtgtttgtgtttttctcttttgttttaattatcacttctatttattccatttctgaaaaccaaatctagactgttgctcttctgcttttatgctaagttatagcaaacatagccaggaaatgccctttcaggctggtttctcatcttattaaaaaggtttctacagtcctaggaatttaaaatgcgacttcataggcaaacatgttcatggtttggccttcaatgcttgttcaaaggagaagttggggaaagaggttggatcacgaaggctcaactatatcaaattggtcatccctagagggaatcacaaacctggcatcactagaagttggagaacaagaagtaggtcactagaggcgtgtttttgtttggcttaccttaaaaatagttccttctgttagttctcttcctgccattattcacacatgctccagtcactgtagtgtctgtatcactcataacaatggatgctgatcaccatggactacagcctcataaacctgagcttaagtaaaactttcctccttctaaattaaacatggcagttcttttgtcacagatacaaaaggctgataaacagagttctccagtagacttgaacacttcctgatcttatgcacaatagaaaatcctcaggtcgacctttactttctttttaaaaaaactgttttgttttgtttttcttgaatatccacaatatatttcacttatactcttcttgcccagttcttgtctactaccatatcaaagcagggtcatgtactttccttttttattttttatttttgtcttttatatttatttatctatttatttatttacactccagattttccctcctgatttaccctccaactgttccacatcccataccttcacccctctccctatctccataagaatgtccacacttccgaccccccaccccaccagatctctaaacaccctggggccgccagtctcttgagcattaggtgcatcttctctgactgaacccaaacctggcagtcctctactatattggaggcctcaaatcagctggtgtgtgctgccaagttggtggtccagtgtttgagagatcttgggggtccagtttaattgagactgctgatccaactacagggttgcccttctcctcagcttcttccatcttttccctaattcagacacagggttcaggagcttctgtccattggttgggtgcaaatatctgcatctgactctttcatctgtttattaggtctttcatagtgcagtcatgataggtccttttttgtgagaactccatagcctcattaaaagtgtcaggccttgggacctccccttgagctgggtcccactttgtgcctgttgctggacctccttttcctcaggctactctccatttccatccctgttgttctttcagacaggaacaattataggtcagagttttgattgtgggatggcaacccctccctcatttgatgccatgttttcctgctggaggtgggcttgataagtttacttctccctactgaaggacattttatctaagatccctccctttgagtcctgagagtctctcagcccccaattcttttgtgcaacttcctacttcctgagattgacaattttcattctttctgctggctctcggggcttcagtccttttccctcacccaataccagatcaggttcccctctccccaccctatccactttccctcccaggtccctccctccctcctcccttgtgattgttttcttctccctcccatgtggaattgaggcattcttacttgggccctttagcttgttgaccttcttgagttctggggactgtatctggatattctgtactattttgtgactaatatccacttattagagagtacataccatgcatgtccttttgggtctgagttacctcactcacaatgatattttttttttatttctatccatttacctgtaaaactcaggatctccttgttcttaatagctgagtagtattccattgtgtaaatgaaccacattttctgtatccataccatcagtcatcagacacctggattgtttccagcttctggatattacaaactttgaacatagtggaacatgtgcccctgtgacatggtagggcaacaacttttgtgtatattcccaagatcttattgttgggtcttcaggtagatctatttccaattttctgagaaacctccagattgacttccaatagttgtaccagtttgaaatcccatcagcgatggaggagtgttcctctttctccacatccttgccaagatggcttttcatctgaggtttttgatcttaaccattctggctggcatcaggtagaatctcagggttgttttgatttgcagttctctgatcactaaggacttttaacatttgtttaggtgcttctcagccattcaagattcctctgttgtgaattcttggttttgttctataccccattttttgattgggctatttgtttttatttatttatttatttatttatttatttatttatttatttattggtggttagtttcttgagttctttatatattttgaatactggatatggggttagtgatttttcccccaatctgtaggttgctgatttgtcttattgactatgtcctttgccttacagaatctttccagttttcatgaggtcccatttatcaattcttgatcgtagagcatgagccactgaatataagtttaggaaatttccccctgtgccaatgagttcaagagtctttcccactttctcttctattagattcagtttatctggttttatgttgagatccttgatccacttggtcttgacctttgtacaaggtgaacaaatatgggtctgtgtactttctgtttataaaaatgaatccaaaccaaacacacacacacacacacacacacatacacacacggtttggattcacagaccatatgaagctcaagaagaaggaagaccaaaatgtggatgcttcagtccttcttagaagggggaacaaaatactgacaggaggtaaagtaagggagggacttgggaggaaaacaggaagggaaggtggggaagggggcaggatcaactatgggaggagactggcatgatatacagagagtcaggaatttgaacagtatgtggcaatgggggatgtggttaggcaaggccccaggttgggggatgggaccacacactcatctctaaattttaacccagaatggctcctctaaaggaaatatgaggacaaagtatggagcagagactaaaggaaaggccatccagagatttctccttctggggatccatcccatacacaaacaccaaatctagatattattgcagatgccaagaaatatttgctaacaggagactgatatagctgtctcctaagaggctctgccagagcctgacaaatacagaggcagatgctcacagccaaacattggactgagcacggggaacacaatggaggagttagagaaagactgaaggagctgaaggggtttgcaaactcacaggaagagcaacaatatcaaccaaccagagcccccagagctcccaaaccacaaaccaaagagtacacatggagagacccatggctctagctgcatatgtagcagaggatggcattgtctggcatcaataggaggagaggtccttggtctgtgaaggctagattccacagtgtaggggagtgcctgggtgttgagatgggagtgggttggtgggtgagggagcaacctcatagaagcaaggggaagatgatggaatagggggctctgaaggggaaactggaaagggaatgatatttgaaatgtaaatatataaaatatccaattaattaaaaaaagacatgttttggaagttactcctgaacataggggctccttgaagtgtggtgatacaaccagtgtcactagtttaaaaaaaaattcctccattctgtaggcataaatcttttgcaacttacttttaataagggttcaccctcttttctagcccatctgccagcagaaatagtggaaaagaaaggttattagcatatgggtgaagtagacttgttcagcaatagttctgtgaaggcgagttgaatcttctttgacatgagttcagtcaacaccaaatatgattcagcagctacagcacagtcttctaggcaaacagacaccaggcatgcatcctcagctacagtctagtcctttcatcagcagataccaggcagctgtagttcaatgctgatgaaacctccaggctctccaactggcagaaggaaaggccgcagaagtggcaagctgccacaggaacctcaccagcaattcttggatgagtttctctcaaagataacattaccacaatgtatcaatgttgtgtaaggtaaaccaatacatgtgagtctttagggataaatagtgaggcagagcaaaccaaacgaatggtcagtacacatctcccactgtctgtgagatcaaatttacactccttgattctgggccatttcctgtgtttgctatatccaaacatcttttcacctgtgtctgcttcaggaaaacactctttcatgtttttgctttaccaacacacactttcatctctgtgccccaggaaaacatcacttgacataagtaactgtccaaagaactagaagtttcaacttcatcctgcccccaccaacaaccaccataatctttctcccagcagatagcaattgcaaatagcttcctggggaagggtggaattttatacccacttccctgtccttcatgatgggctttttctagcttgagtttgtgtaggtcttgtgaaaatatatgcatgtatgtcatcagtctctgtgtttatttcagctttgctgtatatggaaaatgctctcttcctggctgttttgctttttttattttaaaaacctcccaaaagagtaaattgaaagatgtctcccctatttgcttattgtatattgatttaagatacattattagagcattggttttttttttctatccattattgaaggacacaacagtgttctttttaaatctgtataaactcaagtcagacaaaaattccagcatggaggaggatgattcacatcaaggctctctcctacctgaaaatgttggtaattaatttctttatggctgtggctatgaggaggcttatcatatcttggcgaatgataatgcagttaacagtttttggctttacaaatgaactccaaggctgtttgggggtttgcctctttttgaaaaggacacaaagtgggatgtatatgcagtgaggggtgaactgggtgaagttaaggagagagtgaatatggaaaataaacaatgtataaagttatcaaacatacatgcatatatatcatagatattatgacatattatagcatatgccaatgctacaggaaataattaagcatacatgcaattttatatttttgatgatttgctttgaagatatatttctaaaagtggcacaataaaatctaagagcagaaataactttctaagatactgtaggctttttgtttgactttagtgtaagatttgactttattatattttatgtgcatatgacttttatcttaattcacctatgtttactgaattgaatccccttcatatgccttttagaagtataaattctttcatgaacaatcacttctatttggaaatttcaatggctttgtttttaacaattagttctcataaaatgtgttatttttgtctctaagaaataccattattggtaaatttgagatttattttcatcttttttattaaactacatttaaaataattattatttaattgtgcctcagtgtgccattgtgtgcaagtgtactttctattagctgcctaataatttattttaaaagtaattttgtcttttcttaccatcatattgcttccaggtaactactcttttattcttcctccattctgtcatattttttttgcaagtctgtgatagattgattcacttctatttgctagtttgatttgcttctcaaaaatacaatacagatatagtacagaatgaacattgatagccattttggctgatccatgtggattccaaaccactttattttgtttgtctcttccattcctgcataactactccctcacaccaatactgcctaatctccaaccccaacggccctcatcccactcatgttcattattctgagtatttggaatacacataaattctcttcttcatactcctcacagctcttctcaaggtaacactttcctttttgcagctatgcccagactaacagctattttccatgagatgataccttgagacccccaggatttcctggcatgtagacacagtctctttaccttaattcagccctagatagaccatgttcctagcatctgtcgcccctgcacacaactctgtactcactgaagggtctgtgaaataatgtttcagtgagcagagagtttctctgtgattgcactcttgacatgaagcatcagcatgccagctgaactgatactaaattttactggaggtttgacttcttatgtctccaaatctgtgctgttctattaggaacaaaagttgaaatgggttttttctttcttgttcctttgcagaatttagtttacttaatttcattagagcctgatacttctgatgtattttaaataaccaatggtgatttttttcatttgatttattctctttttccaactgttagttttatctcctttaacctgttattcttcatctgaaggctcaaataatttattttaaaagactaaaatggccttaagcaataatatatcattgatctaaatgtattcatgcatattctaaagttttattggaattttggcctatgacctttgacctacctgattttaattgtcaggtatggtttgttttttgttaaaatgaattcatgggaagatgcctggtatactcctctagcaagaaaataggagtctgtgagtaacagaagtccatttctgaatcaaaattcatgcataagttgtgggctggtatatgtggtggtgcctcgggggaggtacaggcagggcgttttctgtgattttgaggccagtctgctttcagtagatttcaaacccaggcaatgctacatagtaggactgtttcatgaagaaaaacaaacctcaagtacaatgatcatctgactagcaagtgagatttactcccctaataaactaatacagaatgctttaatgagaaacatgatatgacatctcaggcatgagatagatggggttgcaagaataagcattctttgcagtggtactttctaacttataagtacttttataaatatcatttaacagcactgtcatagcattcctgacttttagaaatatttaacctcatcccacaaactgatacatgtgcttaggcttgccaattcaaatgcctaacccctcatcccacacactgatgcagaaagcctcttgactcttgtcaagggtgcattcacagataaaatctccactcacctacacattattccacaggcccttcaatgaatacagagagggtacatgtctaacttactagctacttcttttgagtatgcactatccaaggtctcatatttgttcctacttttgattcatctgatatttcactcccacaaaataggcaaagtagaaagcagaccagggtaaaatgaatatccaatgaaaaagtgccctagcaaagagaaacagccactacaaaaaaaaatagtgtatgcattctacttcatttttctcagaaatatttttctgcaaatataactgttgaaataaaccataatctgtggagtctgtaaaaagtaatccctatgaaaaatggattatttatattcagcagaaatgaaaaggtttttacttccttggagtcttggagcattcattaaaatgatcccagatttagtcatttctaaagtgggagttggatgttcattcacatgatactcaagcatctataaaagtaaaaagaataagttttaatatgaagtatataccttagtcagttggataatattatgtttgcctattctctgaaaaataatcaaaatatttgctgatatttctggccattaaacagtagatggaatattaatggcagatgaccatggaacttgatagaaataaacacttcatggaatgcctcacaagaaagagactagctagcttcaaatatgatggtatgcatacgatttaactctaaacttactagactgactaatacaatagaaacattcactatgtcatatctaacccagggaactatctctgagtttagtaactctggagctcctttttgtagggcatattgcaaacattacctcatctatttgtcaataattccatagacataaggaggaaattgagagtgccagagctttaaaacacaaagagagaaaaccttccacattattatacatcctgtgagttacagccctaatttttttttttactttaagacagtgtttctctttgtagccctggctgtcctgggactcactttgtagaccttgtaggtcttgaactcagaaattttcctgtctctgcctccccagtgctgggaataaaggcatgtgccatcatgcccggcagccccagacttttgactcagttgtgtctggtagggatcatccaactccataaaagaatgagttatttatttatttatttatttatttatttatttatttatttattatgttggctagtttcatctcaacttgacacaagctagagttacctaaaagaagggaacttaattgataaactgtcttagtaagatctattggagggcattctctcaaaaagaaattgatgtgggaaagcctagattattttgggtgttgccatccttgggctcaaccattcctacatccctacagaagaaaaaaaaaatcaccaaaccttgaattctcttgcttgaggaagaaaatgacaattcccttcagttatatgtgctggagggacaacaaaaaaatatcacatcctgagaagaaaatgaatgtgatcagacctccaacctaaggaggtagtgctaacaaacaagccaacaaaaatgatgtgctgcagacagatagagctctttgagagaaaggcagttagtgtggctcttctcggaataccattcctcgagctcaatagtactaacagtggcattcttcttttctacttaaaaatcacattattcatggcaagcactaaatgggatcaaagctaaaaagaatcttaatttacaccagttcatatttccccatcaccgatgaaccactgaaaattaatgcaacaatatggggagaaaaagaaacttgtgtggccttaaaacctgaaccaaactgaaatattgctgggatttaacagaaaagcttgggatagtgaagaggtgttcctgttattattgttgtttttattttgaagtaccaatacatactttttgcactgtgtattctttggtgtccaggattattaaactgcatgttaactaggttgttccctaaaggatacgtcagaaaacattttgtagcatgtctatcagatgaaaggtatttaagcaaattacagaatttatggacttttctccacttcaaataagatcttaccatctttctcatctactgctttttttgggatagattgtctaacttctatccattattcaaagtctataaaagattataggtcgggagctggttttttttttcaattctatgttcttgaattcaatcttctattattagattacagcttaagaacctatattactttgtaaaagtgatacttcacacaaattgaactgagagtgtgcttgaaaacatcatgctactattttacacagtttcctttttctctgactaggcattccacttcaatgccagaagcccttagatgcagagggcagacaatggtcttagacactggttgttctgccacaatccagtatgttcttttctttcagttcttgacttaatatcaatttgggatttaggaataatgtaacaatcttttttttttcccagagacaaaatagaactttgcatagttgttaaatgtcttgcctagcaagcaaaagactctgatttcaaaacccagaacccatggaaaaataagtgtggaaatttagtcccagtgctgaggaggcagagacaaacagatctgcaggaattctgattgcataggttcgagacaagctctagaccagcaagaatctgtctagaaaacacaaatgtaaaagcttgacagatggtacctgagtcatgacgtctgaggttgttcacaagttttcaaatgtgtatgaacttacagatataagaccacatgatcatgcaggtggggaagcctgcacgatcaaccgtgaaactagtaaaactgatattctttcactaaaatagctgtgtataatactaaactcctagatataataacctttcttttaaaaaaataaaataaatatcctgaaagaaaaaactatatatggaaataattcccattcacaatatcttcaatatatattttggaataaactgcgccaagaaaaaaaatagattaataaaaagtaaaatttaaaattattaaagaggaagttaaaagacactaaaatgtaaaagaccccttatgatcacaaattggaagtattaatatcataaaaatagtaaaattattcaaaattctttacagacttgatatcctcatcaaagtttcactgacaattttcacagtaatagaaaaagactaatgttcatttggaagcactgaagaagagttaaacaggcatcaccatatcttattgtaacatgttagagagaactctagtgacagaacagcatggtactggcacaaaacagacactggggcacacacacacacacacacacacacacacacacacactcccccacacatacctacttatacctactgtcacctcagttttgcgaaagatgaaaagagtttatgtttaaatagtgttttcagaaaatggtactaagaaaactaggtgataggaaccagattgatcagtctgttaaaaaaatcaactccatattgatcaaagaccataatgtgagatctaagtctgagatgtttagagggaaatttaggaaaccccctgaaatgcattggcatagacaaagactttctgaaaatgactctagtagttcaggaaattgaatcaggagttgacatatgaagtgggagtcggtgggtagggtagcagagtaagggggtaggtatagggtacttttgggatagcgtttgaaatgtaaatgaagaaaatatctaataaaaaattggaaaaattgacataagaacttatgtggaattaaaagaaatcaacatcaaaaaaaggcagtcatgtgaggcaacagcccatggagtgggaaaagcagttactaatctacaactgacaatatatagaatataaagaaaatgtttaaaactaaataacaaaaccacttatccattcaataagtaggtaaataaagcaaacagttctctacggatgaagtaaaactgccccgaaaatatgaaaaatgtttaggattcatgaatccaatcatcaggaaatggaaattataatatttcttttcactacaatcagatttgtaatgattaaacagaaaataacagcaaaagtgtttttggaatttaaatgtttatcttcaacacagcttggtccaagagaaattagtctagacactatgaaaatcagcttatgttccaaaactcctaaactaaaactacaatatgattgacatttttgccttcctgagtgtatctgaagagcgttaaatcacaatatcacatcaatgcatacatatctatgttacaccaatagtagccacaacagtatcgttacaatatcagcctagttgtctttcactaataaatggataaataaaatgtgacatatgcacaatacacaattttattcagcaataaagaagaatgaaatgtcttggtaagaaaatggatgtacctggagcttattgtattaagcaaaataatcctgagtgagagagataaatatcacatgataactgtcttttgtggatcttgattttcatatagaaacagaaaatatatttaggatatgaaagtagaagcaagggttggaatgatggcttagtagataagaactctcactgttcttctagagtgctagtatttggatgcaagaacccatgttcagtggctcacaattgcttgtgaactctgactgcaagggatctgatttgttttttctaatctctgccgcaccctgaaaatgaccaatcttatcaagccatttttcttttcaatatatgcttattcatacatatttgggtgtaacagcctcagcttatttataccaataaaaaagatagttaaaattcaggagcaagttatatcccctgccaactgcatttccaattatatccagtcgccagaaagtcaagataccaaaaaaccccatgtgtatacagtgaaatgcctgacagacctgtgcctgtcagagaacacatgcacagcctaggcatgtgtgtcatgcctagaattccaacaactctatctttagtaaaacacacgagagagagagagagagagagagagagagagagagagagagagagagagagagagagagagagaggatttaggacctcagtgggaaatcacatctatatttccattcatttttgattgtctctgattttcacatgtcaaatttctctgagggattatactcctgtcacatttaaagtcacatttaaagtagaaaatacagccaatgtcattgtccatgtatacttactacatcctaatgatctaatagatttgttttcatggcatgttatccaacataatgctctcttaattcttcatataaactgagtcccagtatgaccatgttctctgctttgtagtgaaacacaataaatatctggctatggtgcctcagctatcatgtttgaaagctggtatccattcatatctcacgtcagaagtctttactctatgcttgtattaccattttactagttcaaatgtcaggacagtcagctttcagactcacaggacagctttagtagttggtattgcactgtacaattaaaaaaaaaaaggcaagtaaaaggaagtgcattattccaaaggaactaagcaaaatgctaagtaatggaaggatcaagcttaaagactgttaagacgttatggtggaaaatgatattagacccattagtgcttgcttgggaactttcacctcttaggcaagcatactgcttctgtccaccttgcctaaggcttttataactgttcacaatcactaaaaaagaaaagtttgaaaaaaaaattaacagcttctcaataactatcccagtgctacgtagctaattttttcatcagtaatggctctgtggccacatctttttcttttaagaaaactgaagctcatacaaatcaatttaaacatctatgcctcatcaagcaaaaggacagtttatcgaaatataaacgatcatatattcatttggtaaattaaacacaacacatgcagacccatgacttcaaagtgtcatgatttacactaaaatgaacacatcttgattaggagagaaaggaagaattaagtgtagtatatataatagaaattacttagacttctttgatcaaggcataattaaaatatcctttctttgagcttgtgcattagtttaataatcaactggtgtactatcacagaatatgagagactacctgctcattaagcaatgcattcatatcagtcattttccttgatttgacgtaacctccctctacttatgtcacatctctgtctgtgtaatatgcaacatgaagatgataagataaatgcacaaaattactatcgaaatgaggtgaaaaatactggcaatatgacttgcaacatgactgtaatatagtaggcattctctaattattagctgtctgcatttactttagtagtagtccatttttgaatacttcttgcaggttattactctaaggcaaagattagagaactcagagggatgcctgggaccttcctgcagactgttacagatacttttcaaatggattatgtggtgaaataagtttaggcatggcagattaagcacccatttcttcaccacaagaatactgaaagcttttaataggctaatttccaatgtgaatcttcacaagaggatgtggaattcaacagttctaatgcattttctaaagtagccctccatctcttgactgttttgaaggtttctggtccttcatatatatgttaggaagatttgtagctactctttgaaatgcatgtcagagtgttataaactcccgtggttctgacttattttgaagacttgctgataatcatgtataagatcaaacaagttccttaaatatcaataatttaataaaattctttaaaatactccttgaatatcaatattttaataacttttcccttaagtatccgttttgggaagaccacgttttctcttctttagttcactttaaagttaaattcattatgtgaaataagaatttgttacttgccttgacaaacctcataaaacactgcaatatcttcatcccacgtttgcaaactttctgcacacacacagacacacacacatagacacacagacacatagacacacacacacacacacatacacacacacacacacaagcacagatacactcatctgcccttcctcagtgatcttcacacatcctaccttaaatatgcacactaccatcaataatgtggataggaagactcttcatgcatcctcactggatttctgcacctccatcataaactagagagctgtgaagacaaacaggcagctccagaacttgaccaaaatcagagtatctcaattctttgatcacagttttttgatcaacgatgaacccaagtcaattaagacagtaagagagtatatcatattcataactataatatgaagcaatttaccttgccagttgatcttgaaagagtatgagtcctactgaaatcctttatcctttcctttcaatttttcatgtccaacagttttcaggtagaatttaagggggttctggagctcagaattttttttttttgcattaaaaatagtattgtctttattttatgtgtatgagcatattgcttgcatgtatctgagggcactgcatgcatgcctggtacctgcagaggccacaataggttgatacatcccccagaactggagatataggtgttataagacacaacatgggtgctggaagctgaactctggtcttctgcaagagcagcaaatgcttttaacaacttaactcttagctctaacccttgaatattttcttttctttttttttatattttttaattaagtattttcctcaattacatttccaatgctatcccaaaagtccctcatacccccccactcccctacccacccactcccactttttggccctagcgttcccctgtactgggacatattaagtttgcaaatccaatgggcatctctttccagtgatggccgactaggccatcttttgatacatatgcagctagagtcaagagctccggggtactggttagtgcatattgttgttccacctatagggttgcagatctctttagctccttggttactttctctagctcctccattgcgggccctgtgatccatccaatagctgactgtgagcatccacttatgtttttgctaggccccggcctagtctcacaagagacagctatatcagggtcctttcagcaaatgcttgctagtgtatgcaatggtgtcgtcgtttggaggctaattcagtaaaaggtacatgcatagtactagtaaattttgcctttagatgacttctagctgagattatctctgagtctgtgttttgtcaaagagtaagtctgtaattcttttggctcatatcctgtttaactcttctcattattactaagtaatttctcctagctagacttattttattactacaaactactttttttgtggctaattttgcttttttctattctctcacctaacattatttggtgagacaactctgatattcttattttaaactgtttataaaatattataactggtttacaattaggattgcaaaaatgtttatagaatttaatttgctaaaatttttagcttactctttattagagatttatgttattttaaaaactatatattatatactgagtatggtggcacatgcttgttatcttggcatgcaaaatggttgaaacaagaggcttctctgagttcaaggtcaacttgggtatataataatttccatgacagccttggtaaaatcatgacatcctgtttcaaagtaagttgcaaaccagatggagtcccagcactgaaatgaggaagtggacatgggccctttctcataaccaaaaagtgatctgtagttaatatctatcctatgggaaagaaaaaaatattttctccaatggtgtcccactggatatattaataacactttaggataggtctcttgcccaagagctgtttgtcaacacaaaacaaattcagtggtatttgaccatttgtatgtgtttgtgttgttggttttgtgtgtgtgtgtgtgtgtgtgtgtccttggtctcttgtttgcatattttactttaaattcttgtgtttttgtggggtttctgtgcatatgtgctccaatgtatggatgttctttgtgttttgttggtggtttgctttttgttattctttgtaatttaaacagagaaaatgagcacggagttaagtggaagtgtaaatgggaaaaaagttaaaagagttgtgtggtgagatcagaatacagtatataaaaacatataatttcgatgtgttaactaaaaaaataaaataaataagatgtcaaaaaatgaagactacactaaagttaacatctggcaatgcaggtttggtatgtttacagaagcacgtaagtgttttaaaattccccaagaaataatgacaaatgaaatgtgcttcatctcataccttcctgttcttatactatttttacatgaacatttctagacatgtcttttaatagagcctaaaattattactggaaaggctgaacttcatcctgcattgttatcaggcatttcttatcattagaatttatgtgtttgctctctcaataaaatgcaaaggtaagtataattcattcagggccatttatgaacacattacagaaagaaagaaagaaagaaaggaagaaagaaagaaagaaagaaagaaagaaagaaagaaagaaagaaagaaagaactctactgtagtgacataatgaacttaagattacaagaatacactctgccagaaggtcattcatttctatcagccttcattttttcttgcttttcatttcttcctttatttttctcaccttgtatctacattaataatttgcctatatgcttattttaaaaattgatgtcttatattcccttatgatctttacttttgttttatagttccttttccaattgatttttgtaacaaactttaaaaaaatgtaaatgcaagtattttgtaaaatggcatccagagaaagacagaagtatttttcatgacacaatgagaaggtgaaaatggagcaagaatgtattctatctactgagttaagaggatatgtggtgtacttcattgaataagacaagtatattgagaaatttcacattaactgtagttatttatggaatattttgccatgttttatattgcactcaggcctctggttgaactaactcactatatctttatagtggtttgataaaaatagttacaattattatccttattttatagattatagaacaaggggtttgagaagaaatataacctgtccaaggtggcacaggccatgaatagaagagttggaatgtagatttgtaaactctggcaaatggctattctagactctatatgactcttgtatgatggagtcatcttcagtcctgggatgctctgaatatcaccttcatctccttctacaaccctctaccaaacttaaaaattcagaggctttgattttctttctaccactcctatagtgtaattttacagggataatctaaacttccctctgtgtcctgcatgtgattcaaactcatctggaacaacaacaacaacaacacacacacacacacacacacacacacacacacacacacacacacacacacacaaaagacgtatgaagataaagtaattgtgctcactctgcagtaccgacatggtccctgatgggatggctttgctgccacagccattaccgtgtacaacaaaattcttcccatgttcagattctcaaatagagcttcaagagtcactttttttttcttgattgctttctcactaatatttctgctccactctaagaatggagagagatagcctttctggatggatgggttatctgtataatgtaatcattaaatgcttaaactcagtctaaatttgaaggtgttggaaaattcacaggaggccatttttgtgtgattttgaaattattttcaattacagattggagcacagcagagtctgtaatatcatttcatgaggcataatgcttccctttgtcatgtctctgttctgattgagatgggcaactttaagcagactgacaaattcatgagtacttggcaatcactgattgagtagacttactataaccatgccacaaataactatcaatgaaagaaatagatttttaaaaaataaaatgtgcaaggcttctaatttagatgtaattgaaatgtattcatcaaattttgaattttggctcaacaggaataggaagttagtactggaacactgacttacagaatacttataaaataaaagtcattgattatacatgtatatacagcaaggactgggtcattgaaatatgcagtggctgattttctcagatacagttaattagcatcaaagagcacaatgcagttatattgtgcctgtctgtatacatgtttatcaatatatcaataggcatatgtaaatataaatatgcttatcaacacttttttcaatacatacctttaaactttctaacaaactgtcagcaaatgaaacttatagaattacatacacatctctttaataactctttcaaggtatataaaggtgaatatattgtgacaatatttgctccatgatttaggcattttcagagaaacttagaaatatagactttcttattcttctggtagatagccaaaattaatgcctacacagcaaaaaaaaaaaaaaaaaaaaaaaaaaaaaaaaaaagatgaaaaatttgttttatccattggctcctatcctaagagtgatggtgcaaacaaaggctgaaaaaaaattggcagtaaagatgacaagaagacagaaactgctatggataagagaaagaacaggaaattttgaatgattatcggagaatgattttttttccaaatcaaatgcaatgtaggtaatattagattaaggatattaatgactgtggaatcatctgaatattaatcaacatattattaacttgtcttaacatttagtccagaattaggctacattatatgatagctggttcatttttctacacatagcaaatacaattcatggctagtaatcaacattctattgtaaccaagacatgatgcaatcatgttcaaagtaagacttacgaattattttgtacagggtgacatttcctttcttggaccctcagaaaagtaagaaacaaaactaacaaaatacaaagacaaacaaaaaacaacaaaaaaannnnnnnnnnnnnnnnnnnnnnnnnnnnnnnnnnnnnnnnnnnnnnnnnnnnnnnnnnnnnnnnnnnnnnnnnnnnnnnnnnnnnnnnnnnnnnnnnnnnnnnnnnnnnnnnnnnnnnnnnnnnnnnnnnnnnnnnnnnnnnnnnnnnnnnnnnnnnnnnnnnnnnnnnnnnnnnnnnnnnnnnnnnnnnnnnnnnnnnnnnnnnnnnnnnnnnnnnnnnnnnnnnnnnnnnnnnnnnnnnnnnnnnnnnnnnnnnnnnnnnnnnnnnnnnnnnnnnnnnnnnnnnnnnnnnnnnnnnnnnnnnnnnnnnnnnnnnnnnnnnnnnnnnnnnnnnnnnnnnnnnnnnnnnnnnnnnnnnnnnnnnnnnnnnnnnnnnnnnnnnnnnnnnnnnnnnnnnnnnnnnnnnnnnnnnnnnnnnnnnnnnnnnnnnnnnnnnnnnnnnnnnnnnnnnnnnnnnnnnnnnnnnnnnnnnnnnnnnnnnnnnnnnnnnnnnnnnnnnnnnnnnnnnnnnnnnnnnnnnnnnnnnnnnnnnnnnnnnnnnnnnnnnnnnnnnnnnnnnnnnnnnnnnnnnnnnnnnnnnnnnnnnnnnnnnnnnnnnnnnnnnnnnnnnnnnnnnnnnnnnnnnnnnnnnnnnnnnnnnnnnnnnnnnnnnnnnnnnnnnnnnnnnnnnnnnnnnnnnnnnnnnnnnnnnnnnnnnnnnnnnnnnnnnnnnnnnnnnnnnnnnnnnnnnnnnnnnnnnnnnnnnnnnnnnnnnnnnnnnnnnnnnnnnnnnnnnnnnnnnnnnnnnnnnnnnnnnnnnnnnnnnnnnnnnnnnnnnnnnnnnnnnnnnnnnnnnnnnnnnnnnnnnnnnnnnnnnnnnnnnnnnnnnnnnnnnnnnnnnnnnnnnnnnnnnnnnnnnnnnnnnnnnnnnnnnnnnnnnnnnnnnnnnnnnnnnnnnnnnnnnnnnnnnnnnnnnnnnnnnnnnnnnnnnnnnnnnnnnnnnnnnnnnnnnnnnnnnnnnnnnnnnnnnnnnnnnnnnnnnnnnnnnnnnnnnnnnnnnnnnnnnnnnnnnnnnnnnnnnnnnnnnnnnnnnnnnnnnnnnnnnnnnnnnnnnnnnnnnnnnnnnnnnnnnnnnnnnnnnnnnnnnnnnnnnnnnnnnnnnnnnnnnnnnnnnnnnnnnnnnnnnnnnnnnnnnnnnnnnnnnnnnnnnnnnnnnnnnnnnnnnnnnnnnnnnnnnnnnnnnnnnnnnnnnnnnnnnnnnnnnnnnnnnnnnnnnnnnnnnnnnnnnnnnnnnnnnnnnnnnnnnnnnnnnnnnnnnnnnnnnnnnnnnnnnnnnnnnnnnnnnnnnnnnnnnnnnnnnnnnnnnnnnnnnnntacacagagaaatcctgtctcaaaaacccaaaaaaaaaaaaaaaaaaaggataatggagtttctccttccatttttccttttctccctctctttcaaataaactataaggattttcctcctcaacacactttctactaaagttttataaatagttcctaaaaataagcaaactctgtatacatgcctgggagtagatttgctttgcttatagacagtagtaagaatattttcattagaacatatctattattcttttttatcatctgttctcttactgtgaaaccttacttagatgtttattgctttgaatgcacatgtgcattaatgtacatgtatggtcatgtatatgtatttccatgtgtagggtacatgtatgtgtacgtctatgcatacatatgcatggaagggacttagttgatgccagttgtttttctgggttaatttctatgttatgtaattgggaagatttcttacctaatccagagcacttcttttcagttagtttggctagccagcacactctgaggtttccctctctctacctccagtgctctgagattgtaggtggtcaccaaaccaaccttacttttatagattctatgggtctaaactttagtttccatggctgttcactgatctacaccttcagcttcaatttagatgatttcataagttcttagacctatacctatctaaaataaattctctacttttacctattttagtttttgttttgtggtctatatttcttttgtttatttgtagaatttttgatttaataatcaaatttgagattctttctgaaatatcaatcataagaattcagagaagttcctactttttatggtaatatcattgtatttagttaactttaaatatccaaatgaataacaggaataaagttatgttttttattgttaattctttctgtcaatctggagaggactctttagtttccatggttttgtcatttttgcaatgattttgaattggggaatttgtagacttgaagttgtaagatcattcacataggtgaatcacatcagttcttctggtattgtataacttttttctttgatgaggtgaagtcatatgcctgtggaataaaatctaagacaatggttctccagaattttgagttactaaagacatgttattatcaaagtaggtaattccatactttcttgttgcagaatttaccatctacctacctcaatggcagccgtacatgctaattattcatctctatacagtttgaattttctctatacagtttgaattttgtaaataaagggaactggatagcaaagcaaagaaaaatgatgcttagtatagtgtgatatatatatatatatatatatatatgctctgaggtaagagtaccaatatcatcaatacaaagggttataatggcctgggtaaaagagagactcatgcacggttttgatttcagagggcagcagtgttccacaaatagaatgtgtctgaggaaaggaaataaaattgacttttgcctcttttttgttggatttggaagtgaaattaggacttgtgtaccacagaataagggtagatgaatagtttaaggatgtgatattaaatgcagaggaaataaaaaacattgtttttctatgttatactctctctcttttttgcatggggagtctctaacatgtctctgaagtaaatatgataggcctacatttgaaaacatcacatagggctggctgtgcagtccttcttcagtcctgaagaaacaactttagtaactatctctgaacagatggatgcctatctttggagagcagggagacaggagtgagaaccaatgtagaagcagtgtgttggccctgttctctttagaaataatattcattactccactttcttcaaaggtagtagttagatggcactctctcactgtagaaattaggttttcaagtctcttagttcatcagtgatccaggtaagtgatattttagtgcatgattttgtgatggactataaaaacaattctttaggaccacaggttgaaaaaaatcctactgattttcttgtaagatgcatatttgggcgtcaacctttgcaaaacatgcaaagtctgagctctttgatattgctcttataaaagaggacaccgaaacataccaacattaccattccacttgggaattatttgaaaactgaaataagaacaaactaccaactttataaagacaaattggaaaaagcatccttttttttttttagttaccctaatttgactattcaaactaaatctttaggtcagttcaactacagctcagtgacgtattaaaattataatggaaaagataaaattagtatttacatatgtggaataaagaaaaactgaagccttaagtaaatttgtcacactgaaaaagattacaaggaatacatctgctgtaaaaagcaagtaaagaagagaacccagagaaagtaaaagatattaattttataattttgttcccccattgttacctttccaacaaatcactcttagtcccttaagataaaataaatcagtgagaaagttggggaaaaatcgtttctcaaatcattcaagattccacagctgagaaggagaagtgcctaaagaacaagaattatccactgtcccctacacattcttcagccttctctctaatgtaagcacacatttaaaaaggcagtgagagggaagaatatggtaatgccattatttggatttcaactgcacatctgtaggagattgttcaagaccacgcgtatgtcataacattagctgttggtgacaacaaactgtggctgctctaagaaaaggtaactccaacagaaagatcactttgcaatcatatcaataaaatgagagaaaaatagtttctatttttttcaaaatggaacagcctcaaaaaaaatcatagataacaaaagtgaaagcaatagaacactgataacttcttgacacttttgccaaattttgactgttcacaataaccaggcaataagaggcttttattgtttggatttaatttttagtgaaaaaattcaaacagtatattctggtcataatctctcctcccacatattatcttgaagcttctacgtccctatgcatccaactcaataacctttctttctctctttagaaaaacaaaagcaaataatagttttaaaataagaaaaaatgtaatatatacacacacataactcataatccataaaacatctcaggtctctgggattggtcctagaaattgctcccacacacccacctttcaaccaccacaactgcgtattttcattcattctccaggacctctgagcagctctccttctgtcccatacctcatccagccctgctattcaccccttctttctcccacccaggtccctctctctctctgcttcccatgactattttgttatcccttctaagtggaatttaagcatcctcacttgcatgttttaattttattttcagctgatggcagaatttaccaggttgagaagttttaaattattaataattcaatttgttagttcttatctttcatttatttttatgatattagttttaagtcaattgtgtgtggagaggtgttggccatcagtgacaagatagtctaaagctatattttcaggtgattttgagttggcttatgaaggttcagggaacccaaatattatattttgcaaaagtcttatatgctcttaagtactgagccatttctctaactcatttctttttcagtcagtctgttaaacatagagattttatacctgcctgtattatctaaatatttaatttattaacagacatttattgttttccccttaatactactatttttgacaactaaaagtgatgtctttctcttatttctaatttttgtcaactgaactttctctgtttctgtgttagttttttttttttaattttcttaatattttcagtgaattagccttttgattttgtggcaattctaacattgccaattctctacttcatttacttctgctgcagtctgccttctgtttcacagagtttgaatttatattctcttgtattttcagcttccttgggttaagtcaagtcattaatttgagatttgtaaaattgagccgtttatagctggtaacttcattctatgaactgtttacttcacatttcgtaaagtttggtacattgggtttccattttcctgtaactttcgttaacagttcgttcctgatttttcttttggtccatctgttatttttcacctttattactttatgcccacaattcttgtaaatttcctaaattttgattttctagtaagtttacattttccgttgtacatagagattaagctacaccttcctatgactttaaatatagttactgtaatctgcatttgtattcattatgctcaactgccaggctattgcctgaatatggtagaggcatactcaactatgacctccagccctagcctgaagcatgacataattcaaagcctaataactgtaatttcttaaaatgctgattatatgcataatcccttcataagccttcttatctgggattagaggacagtcatagcactaaagtgtgtaagtatattcatatgggcataaagagaacatttcatttcttaaattagttttgaaaaatagaaaaataatgtaagattactaggcttttgtctcttaataagatttattttatttttaactgttctagttaaataaaaatggcccaagtaggctaatatatttgaatgcttggtcattaggcaaggatggcttatttgggtagctgtggcccttttggatgaagtatgttactgaagatgagctttgaggtttcaaaagctcaagtcaggtccatttgctctcaatttctgaaacttatggatccaaggataatgaactaaacccctgaaattataagcaatcttcagttaaatgtgttccttcataaaagttgttatgatccgattatctcttcacagcaatggaacactatgacagctgtataatgaataaatgacacacatctgcagactatctaatacataattacataatacaggtaatatatatgtatatgaatatccattcacactacacatacacacttttactttgtatttagaaaatatagattgatattttatttaaatatcattaatattcaaacaaagaaatataaaattatgctggtgaatttgtttatattctatagcctttgcattagcagtacagtataagaagaaaatagacataaattaacctagtatagctagagctaagaaaggacatagttaatacaattgttttcctcttatcctttattgcacatctgcatgtataataatgaatgatcacataatgatcagacagtgttggctattgatttaattttcttgactaatataactatgaaggcactaaaaattctcccttatataaaaagaatatgcttaaaagataattaaatggcttttattgggtatccaagtaaattatcaaagtggaaattaaactaagatttcttctatttatgccagtagctatcaaagaattctccttggtctgaaacatatttctccagataataactttataccaatctttgttgtttcttcctcatctaaagatatattgttatatttatattcaaatacataatatcaagacatttctgttattttttcttcagagatataatgaaatgataaaatactcagagtcatccaaattcatgcctagaatgaggcatctcatcatggaaccaacgatataattacaagttataagttataattgggcagctaattgtcaaaatttgattctgctggcagttataaaattcttgaccttgaacaatttctttaatttggggaagccttaattttcaacattttaaaatgaaatgcttggagtaagtaattgataaaacgtctttaagaattattttaacttactaatgcaaaaggtccacaaaaggggaaacagtagagttttatttactctgcttgttgccttccaacaagccaagaggtatagaattacttccatttatttgtttttttttcccatttaaatgttttattagttctttgaaattttgatgcattatgtttttcataatatccatctcacatatccttcaagatccttccctaattctagagcctccaatttcagtcaatgttctgttgccatgaagagacaccatgatcacagcaatacttataaaagaaagaattttttagtaatgtgcttatagtttagtccattatcatgagggaagggcatgtaagagcatgcagtgagtcatgatgctggagatgtagttaggagttctatatccagatttagaagcagcacaacgagaaagaaagtgcccaggtttggggttttgaaagcccacattacactgacatacttcctccaataaacccatctctactagctcctctcaagtagtgtcactctttgatgactaaggaattgtatgacgctataggtaaaattttcttttgtttatttatttgtttgtttttaaatttggtggcgtgatgaggcaggaagaggtgactcagcagacccatactgaggcacccatgcacgtgtgctcgcgcgcgcgcgtgcacgcgtgcgcacacacacacacacacacacacacacacacacacacacacacacaacacacacacacactgagatactagtcaaagaggggtctgtataaaatgaagtttctttggggaatgagaagtggagatgagaagagagtggaggctgagaaagacagaaaaggacagaaagagcaaaaagaggagagagaaagaagggaaaaggctagcttgggatatgtagagagagaaagggggaaagaaagatagagtctagagagagaggcaagataaagaggagagaaggaaaagaagaggaggaggaggtggaagaggacaaggaggaggaagaggacaagaagaagaagaaaaagaagaagagagacagagagagagatagagagagagagggagagagagaacacaagcacaaacactcctttaacagcaaaccaagcttatatctggctgttgctaggtaactgttgggcagagcctagaataaatgcaaacagtggggtccttattcaaaccaactgcacatccaaatgtgacaccttactttaaaagaattgaagaccataaatcccattattattggctatgtactgttacatgtatgtccacccactggtttatattagacctactaggaggtgcatctttaaagaaagtaaattctcccaacagctgtcacttaccaatagttccttagctaaaggttgaaattcatgcatatctcctccctccatcctggaattttttctggcttaaacttgagcaggtcttgcaaatattgtcacaactactgtaagcacaaatgtaaaattgctctgttgtgttccaaaaacacttcttccctgtagtaatctactgataatatgtattctgtctattgtactgtccattctgcagtgatcattaagttttgagacaaataggatatagtgtgtgtgtgtgtgtgtgtgtgcacgtgtgtgcatgatattacatgcatgagtatatacatatatgtatatatgtgcatgtgtgcatgtatgtgtatatatgcatatatatatgtatatatatatatatatatatatatatatatatatatatatgtgtgtgtgtgtgtgtgtgtgtgtgtgtgtgtgtgtgtgtgtgtgtgtgtctatgtactctatagtaacttatggatggatgtgtgtttttgtgtctatgtactctatagtaacttattctctgtattgtggcctttagagttctgtctgttatctccattgtgagtagcaaaaattaaaagaaaattatcactgtttggcatgtgtggagctaaatgctctagaaaggacctcaagtttctccagatttgtgtaaaatgtctcttgagtaaccaggagtgtgcttgaatcttaagcacagcattttggaactgtgactgacggaacttgcacttgctattttgtatatatcactggcagtcaaaatttttgtttgaaggcaaaatattttcaaatatgacaaaattatctaaaataatagttcttaattagtttctagacaatatattttctcaatatttttaaagctgtgcacccatatttaatatttatttcttaaatcatggtctcccttcaggtttgtcttactagggtagaatacccaaggcaatgctgaaagtaaaaatgaaatctttagttttcagttatgaactgaaagcctaaaatgggaccatcctacttatatagtctatgataatagcctcatggtgggtgagtgtagtcacagcaggaggctgttatcatagactatatgaatcaagaaattgtaacttgagacaggaaggctaagagtaagtcaagtgtcaggttggctcttacagttaacactcaagggaagtaaacaaggacaccatgagaatctctttaatctttgccaaaggcagcaacctcagtgaatagtctctagactctaccccttaaggttcccaaggacagtgcctataaccagttgaactccggaggaaactacttcttaatcacagtactgagagatattcttgtttatgcctcccttaaaagtaacaacagccaaacttgaagctcaatttattaagaaagccagactatataaaggtcagtggacattattgatgagccttcaaattcagacaatttaattcagataaaagttcaaccaatggtaaaagaagcaaatacacatttaggtaaaaaagtgatattagtggtaatttttgtatttctaattctttcttttattattatttatctaacagctataggtaagactaactatgttaaaatgtagtatgtactatgaatgtagtaattagtatgtatcactgaaaaattattagttaagacaagattgttctagtactaaaatttttagacattaataagtaaatcaggaaatagttaaaacaggcactggtaaaaacatgaaatctggagtcacatattcactactatgtactgtagaattaatgtatgatcttatattattagatttatcatctgaaaaatacttgatactttaaatatttattaatttattctctcatatattacattctgatccactccctatctcctctactttgccacggatctccttgggaagggaaaatagaatagatcttggtagtggactggagtgggtgggcacaggaacaggaaggataaggtggggaaagaatgaggggaaagaatactgggagaggcaattggaattgggagggaattgaaagacaagttagaaacctagggcaatgcaaactccaagaaatatattagggtggtatattttcacttctcatccattctttctcctatttccttaaaaaaaaatgaaaaagaaaaagaaaagaaaaaggtaggccttcagagatatcaaccaaacacgacatatcaaaatgcaataaaattaagaacctaacctctttttattgacagattgggcaaaccaggaagagacaagggtgacaaaagcaggcacatcatcagaaacagccacctccccctctcttagaagtccaataaaaaacactaggctgcacacctataacatatatacagaaggcctcatttcaacccatatttagaggctccatgactgttggatcagtatcagtgagcacctaggtccaggtttgttgattttgtgggttttcttgaagtatctgtaacccctctggcttctacaatctttcctccccctctttaacaggattctccaaagttgcctaatatttggctgtgagtctctccatctgtttctatcagttgttggatgaagcccctttaattatcatttggataggcatcaatctatgagtatagaataatatcattatgtaccatttcacggatttggagggggtggctatactatagatagctgggccatctagattgtagtttctggtcctctaggcaatgtcaatgatgggctcattcttgtgacatggatggtccagtaattggtggcaactcccacaatttctgagccacccttacaccagcctatcattttgacaggacaaaatgtaggtcaaatgtttatggctgggttgatgtaactactccctacactagaaatcttgcttaattgtaagagatgatctgttcagtctatcccctattcctctaggagtcttcattggggtcaccccaatatattccttagaatttccattgctctaggtttttaacttagccctgaattgccccccccccaatgcaattgcctttcccagtactgcctctccattctctcccaaccttattcctccagttcctgtccccccaccactccagtcaaccaacaatgtctattctatttccccttcccaaggagatccatgcttccgtgaccttggacttctccatattatttagcctctctgggattgcattttgattatccttttctttacagttaatatccagttataagggagaatatagcatgtttgtttttcaggatctgggatacttcattcgggatgaaggtttttttctatttctatccatttgttcttaaatttcatcaagtcattgttttaacagctgattagtaatccctcgatttaatgtactatattttctttatccatttttagttgagggacatcttggttgtttccactttctgtctactaaaaatatgttcagcaattgagcaactgtttttgtggtaggatgaaacaagctttagacatgtacagagagtggaatagctggctcttgagctaaagcgattttatgagaaacaaccatattgatatccgatgtggctgttcaagtttacactctcaccagcaattgagggctgttccccttgccccacattctctctagcatgagctgtcacttatgtttatcgtctaaacaattctggcaggcatgagatggaagctcagagtccttttgattttcagttccctgattgctaaagttgttcaacatttcaagtgagtgtttttttggtcttttgagattcttttgttgagaattttctgtttaaatctgtatcatattttttaatgcaattatttggtttgttgatatctagtatatatataaaatatacaatatatatatatggaaattagcctctgtcagatgtagagttagtgaaaatattttcttatcctgtaggctaccactttgccctattgattgtgctgttttgcactgtggaagattttcagttgaatgagatctcatttgttaattgttgatattagaggctgtgtaatagcataaacattatctaatatgaaatactgtaaatgtacctagtcccctcaatacgtttgaggtaatgttatttattttatttctctcaggccctcagtgatttattttttccaaatcaatgtttttaagcacaattttttaatatttaacaaaatagcataaaaataacattaagaattacattcatgtaatatctgtaaaaccgaattgcagacagactgtaggcattttcgatggaacataatgtattggtcatccaatattttccattctttttttattgcatattttctttatttacattttgaatgttatctgctttccatttccatccctccacacccaagaagccccctatcccatccttcctccccctgtttctatgagggtatttctccacccacccacccactcacacctccctaccctcagttcccctacactggggcatctatggtaccttcataggaccaaggacctctcctcccattgatgccagacaacaccatcctctgcaacatatgcagctggagccatatgtactcttgttgatggcttagtccctgggagctcttgggggacaggttggttgatactgtttttttcttgtgaggttacaatcacctgcaactcctccagtactttctctaattcctctattggggaccccgcgctcagtccttctctgtatgtttaaggctccagcatggcctctcaggagacagccatatcaggttcaattcagcatgaacttcttggcatccataacagtaactatatatgggatgaatcccagatgggacagtatctgaatggacttttattcagtctctgctctgtatttcatctccatatttgctcctgtgagtattttcttctccttctaggaaggaccaaagcacccacattttggtctttcttcttgaacttcatgtggtctgtgaattggatcttggttatttagagcttttgggataatatccacttatcagtgagtgcataccatgtgtgttcttttgtgattgggttacctcatcagtatgataatttctagttctatcaattgacctaagaattttatgaattcatcatctttaatagctgagtagtattcattgtgtaaatataccatattttctgtatcctttcctcttttgatggacatctgggttcactccagctcctggctattataaaggcagctatgaacataggggagcatttgtccttattacatgttgtagtgtcttctgggtatatgcccaggagtggtatagttgggtcctcagatagaattatgttcaatgttctgaagaaatgctaaactgatttccacagtgattgtaccagcttgcaatcccaccagcaatggagcagtgttcctctttctctacatcctggccagcatctgctcttacctgagtttttgatcttagccattctaactggtgtgaggtggaatctcagggttgtttggatttgcatttccctgatgagtaaggatgttgaacatttcttagattcttctcagccatctaatattacttagttgaaaattctttgttttgctctgaaccccatttttttaaaaagggctatttgattttctgaacttgtcaagttcttcatatatattggatattagccctctatcggatgtatgattggtaaagatcttttcgcaattggttggttccttttttgtcccattaacagtatcctttgccttacagaatctttgcaattttatgaggtcccatttgtctattgttgatcttagaacataaaacattggtgttttgttcaggaatttttccaatattctcatatgtttgatggtcttccttgctttttcctctataagtttcattgtctctggttttatgtagaggtccttgatccacttggacttgagttttatacaaggagataaaaatgggttgatttgcatttttatacatgctaaccaacggttgaaccagcaccatttgttaaaattgctgtcttttcccactggttttagctcctttgtcaaatatcaagtgatcatatgtgtgtgggttcatttctaggtattcaattctattctattcatcttcctgcctgtctctgtaccaataccaaacagttttttttatcactattgctctataataaagcttgaggtcagtgatagtgatttctccagaatttctattattgttttacttatatatctattatatttttcactatcctgagttttttgttattccaaatgaatttgaaaattgctctttctaactctatgaagaattgagttggaattttgataggggttacattgaatctgtacagtgctttcagtgagatggccatttttactatattaatcgtgccggtctatgagataggagacctttccatctcatgtgatcttcttcagattctttcttcagagacttggagttcttgtcacacagatctttcacttgcttggctgtagtcacaccaaagtattttatactatttgtgactattacaaagggggccatttttctaatttctttctcatcctgcttattctttgcgtagaggaaggctactgatttgtttgagttaattttatatgcagccactttgctgaagttgtttatcaggtttaggagttctgtggtggaatttttggggtcacctaagtatactatcatatcatctgcaaatagtaatactttgacttcttccttttcaatttgtatccctttgacctccttttgttgtctaattcttcttgctaggacttcaagtactatattgaataggtagggagagaatgggcaaccttgtctagttcctgattttagtgggattgcttcaagtttctctctatttagtttgatgttggctacagttttgttgtatattacttttatcatgtttaacgatggcccttgaattcttgatcttcccaagtcttttaacatgaggggatgctgaattttgtcaaatgctttttcagcatctaataaaatgatcatgtggattttttctttgagtttgtttatgcagtggatttctgttgtggtaaatctccacccaaatatgttcaggcaatgaaaacacaactcaataagaataaatactgtgcccctagattgggcagatctaccactacactaccatcttccatatctatgagaccccttataacttgcagtttctccaggtgttggactttttttttttttttttggacagggtttcactgtgtagcactggctgtcctggaattcactttgtagaccaggccggccttgaactcagaaatccacctgcttctgcctcccaagtgctgggattaaatgtgtgtgccaccaccgcctggcttggacatttcttttttaagtgctccttggccattcaagattcatttattgagaattctatgcttaacactgtactccatttttaattgggttatttggtttttaagagctcataggtgtcagggtgaacataacattaaaaaaaaaaaaaactaggagccacaaaagggttgcttctctgactgtcagcaggtgaacatagagtgtaaagatacaggagaaatatctaaccacgccctttccacatttccctttcgtttcctcattctcctgaggtgaacctgaattccacttgggttacttgtgggatctttcgctattgtcttgtctgtacttacatttaattcttttataattgtgactgctctcacaaatattttccactactacctagggtggactttgtgagctttaaggcagactctatttttaattgcacttgaaatggatgttaaattccttgttatgccctctccacaatgaaggctttttcttctgaaattatagtacaaccaatgggaaagaatctctgagaacccaatgcaaacggaacaacagtcacagtccttacatcatctattcccttttactctgtactctcttaaaaggcatgaataccaatcccataatttacctgattgtgaagaatatagactggatatgtaattctgattgaacacttggtgtggaaattgcttgggtggctggacatagtagttgggatatctgctctatactgcctctgaaaatgcaacccatgcagccacagtctgagcaacatatgctgctcattggctgccttgttaccctgactgggcccattaatataaagcataaacaaagcctggatgactggagctggccattttgttacaacatatggtggtgatgtcctagatatttttatcctactcccgcccagatgttcagatctcctgatactcagtttaagcttgcaggcaagatagtagagaatgcccttgtgatttggggagaaatatgttggattttaccccagtgccttgcaaaaaataggtggtggacaattaataagacacctaatgctctctttaaatatattgtcctatttcaaatagagcagtaaatctccatgaatttatcattaattttctttagttgtctttccttgaaattctgtaataccaagcaaagtgaaatgtgctttccttttccttgaaaagatatagttaagccaaacgtaatatttcagccaaggcaacccagatgatttacttagctttctctttagctgcacatgactgaatgcagagccccattatgttcaagccatggcaaacttgaagaacagcagcatggtatttgtgagagcatcacaacagccagagttctatcccaagtggtctggcttgttagaccagcattaaaaattgtggactctcattacctctaggattcccttgaaattttcgtttcattgtttactttcatgacattctgaatgttctctttccctttctcaggactgagtcttgccattcttgactctctctgggacacgaaaataggtcttagattttactattttgcctcatttgcaaggttaacagttatcacactctaccagatagctggagaatagtatgtcctcactgtagtccctgtcaaagccctagggtagctgcgaaatcagcaatcctctaataggaaaaggaacagtgctgagtataatagtaatgtgccacatccaagtggagcttttcatcctaagatgcctaggctctttgccaacacccttggcactaatcctgagtggcatggatgattatgaacattttgtaggtggaaaaccagaagagtgctgggcaagacacagtccaaacaaataagatcatagacaagagacttgttgaatttccaactgtacagccagaagaagaaatgagaaaagaagttgtttacttctaattttatttactttaattactcttgttattaccatttgagtctgtaacttttagaattatttaatcatgcattgattaaagtttccaaaaaattatcacttctcatgttctccctaaatactcagagattgttattccttcctctccgtggatatttcatttacaagatacctattgttttataacttgctgcttagaatctttattttctcagtcttggtgtacctggaccaatttttgcatatagttttggttgtgaaatgccatgaatgtatagacaataaaagtgaacatacatctacgttcatgtatatgtatgtatacttctcttttctgtaagttgtcaattcttgagagacatactttgggcagaaatctgtgaggtttgtctccaaagtctggaggctctgaaagacatcattggcactatagttttcatgtaaagaaactcaccatcccagtcaaatagagtatgtgattaatttgtgtcttaaaatgcatttttcttctctattttagatcagtgatagctatgcaagtttatactttgtttctttttttactacagaatatagtaataacaatcaatgccattaagtactcatagtttaacacatttgaaaacagagtgccatgaaactagattatctataaagctcggtgctaaaagagtttatggaaatacagctgtgtaacataagtattagcgacatattaaatgacaaaaaccctaaaacatatgtgtgtcacatgatatgccatctggtgtttgctgtgtctgaatgtctgtagttggagatatttggagtatactaattcaatatttactttgtagctactatttttattcatagtgttcacctatatttttacaatagggttatgctatttattatgtgtccatttaagatgaaaacatatgagctaattgattttaaatttaaagttgatgtaatcccatctattagtctaagggcaattcattttatcggaaatagattctattttcaaagtccttattcaatcagggggtttactaatttatgtacttatttggacaagacaaacattaattgagggcacttttattctgtaaaatgcctctgcctgcctgtataaacataaatcaggtgataaacgtaagattaagaaaggcagatagaaataaaagattaaattccgagaaaactcagagatgctgaacattgttttggggaggttcaattcatcccaaatgcctggtaacttttctttaagtcttgcatttttaaaaaattgttacatttacacacacacacacacacacacacacacaaacacatgcttttttatactcaatatttccaccttctttcttcttaaaattcctgctatctctccacatatatttgaaaatacctagcgaattcatgtctatttcttttgttcttcttatccattcaagcctgatgagctcagcagagggctctaaggacagtaattcctcctgtccaccaatctattgattgtcatttttaaaacagaacatctattgataccaatttgaaagtttctaatatgaagttagaatcaccattctttgatagctaattgaccatctccattaagtgataataatggaggaactaaggtaaagagctgattctactggaaataagacaagatgggtatggtagtataaacctggaatatccagcattggaaataggaacaagacttcaaatcagccttggcttttgagactctgtctcaaaaataaataataattatatttatttatttatttatttatttatttatttatttatttcagaagggctgaaattagtcagctttccaggttagttacttctcaggttctttgcttgttctggctgatgaaatcctctccatctccaaaggaggaaaagattaattaaatctgtataagaggaatttacatgagatgatttcactatgttagattctaattacctactctgcccattgaaagagctagggttacttaaaatatttgtttttttttttttttttttgtaattcgctccactctgcttcagactgtattgcatccctctgagaaaagtttcttctagaacagtgataacctttgtcaacaaagtttccatttccattcccttctgctcctactgagattccttatcaggggctgcctgctgcctggtgatttttgtgctaaccattctgttatgaaaactgagaaaaatatttcaagaatcccattgaagctttgattgatataaagtacaataaaaacacccctgggattagtgacaccaagctttgcttttgactttaacattgaagaggagggagagagaagctttgtttagtgttgacccgtgcaagtagaggcaagatgaatcagagtgttgtttgttgaaatactctggagcaataagaacatttggaaagtaatgaggatagtgcttagattaatggcttaggtcatatttcatccattatacttaacacaggaggaaaaagacccaaagcaggaagttggcacaatcttcaaaattctacacatattaccaatcaaaggtcatggtttaaagttctttcaaaaatccaagcaatgctaattaacagctttacaaagcaccccatttctcctataaattctttcaacatctcataaaatttggtctaaaatactgttttatttttcaattattcaatggaaataaattattttattttattttttaattaaattataagttgaaaagttaaagtttttaaagagatttattagttttctccaattgtttgtttgtgttttcctggctttctttgaagaatttgttcacttcctccagtttgtttgtttgtgttctccactatttcttaggggaattcattcataatctcttaaaggacccctatcatattcataaagttgtttttaaggttgttattatgtgctatgactatgttggaatactcaggatttgttgtagtaagtaggatagctgagctctggtggtgacattttaccctcgatgttgttgattttcttctaacactggtgtctaagtatctgggtctggggtactattgttcttggttacagaacatcttaagactcaaaataatactacatgatttttgctttagagatttccatctctttatgcacagttttgcacctaatactaaggtgctctgacatccattttgaatccttagcacagtaagcatagactgagaggccccacagtagaacgcatagatatcaaagaaacccaaatatgaataaaaacacaaacacccacctcttcgaatggtgtaaagatataataaatacaaataaactactaattttgcctgcctgaatctcaataaatattatttattgttgttgttgttattattccagtagtttgaagaacagtagaaccttcaattttatgaaatgaaattgtcttatttaaaagtgtcactaacagtgcttgccaagtatattgttttaaattattaatttacaaattgcaaattgaatttgttacattattaaattatattttgttctgttctcaaaatgaatattaacaaaatattaattcaccataatgcaaatgtctttttcaagtttagtgacatgtcagttaatcatgagagaatatgtttgtctccatggctcctttgtcctttggctttgagtttttttcttctgtttctgtgtttgctttgtctcactctggtgtgtggtttttaattttctcttattttactattatttttacaagcctatttgcatttggataagagagatggagagagaggatgtggatttgaatgggtaggtgaatggagagaatcttgtaggagttggggtagggaactgttgatcagaatatgtgtcacatgaaagaaaatctattttaagtaaaaatacaattttatagaatatttatcaatacttaaaaaacagcttttaaaacatttacttatttgtttatgggggtatgtgttcttttgtgagagtgtggagatcagagacaacttttgtccttcagttacaagggccctgagtctcagattcaggttgttaggcctgagttacctcaggttgttacctgctgagttattgtgctaccttgagaaatgttttttataatcaaaagataaaaggcaatcacttaatattatagttatccagtcaaggagtgaagaagtcactttttgaaaagaaattccattctaataattgccccagttataaacaaaatgttatgaagaagtataacacacacttccactgtgtgtttgtaaaatgtgacatatttttgtttatttactcagctaaacttgtaatggattaatggatcagttgacctgcatctatgtgtaccttgcgtgttgttggtgcccattctatggtacacacatctaggccagaggaaaccagatttggttccctccttccatcctttatgaggatctggggtttgaactctaggtttaggatcaaataggaagcacccttacctgcagagagctatctttctgggtatgggacatgaattttctaaaagtagatgtcatatcccagttttaaaagttgggacacatctgcaacaggatgtttattaaaatatttctttctatctatttctataacttgccttcaaggccataggttcactgatgcctacaaggtaaaattaaaatgaacactttaaagaggacaaactagctttgatgtacttatcctcagaagttgaaacaccaggagctggtggacattctgcgcttttgatcctatgacatgtgacacatgctccagtatatcttgggataaggtgatcaaagactgtcaatgatgctttattaagccagccatcttctagatttcattctaccctgtgtcccatgtgatcattaaaaaatcgtggtttataattcagtacacagacagcaatatatatccttctccaagtgcttaacctctacattactctttcccagtgaaggtctaaaaatgaaattgtcaggttacagactcttggagccatggcttcttataatactgtttcctgcctcttctggacattattgatttttccataactctgcttgaaactgtggacataatttacagataaagggtgaagaggacctttcatgttattgctgccttagagagagacacaccatgccctcttctttttcaaacaataccacactttacagtattatttcttggaatgtaatataattccctggaattaattatttaatcaggtttagcttagaacatgttttataatataattcctagtgaatgcacatatcagtttcatttcagtttttcttgctatgacattttatcttgatgtggtatttctaatgtgggcatagtagttccctggtttctttgtcttttggtgccttgtattctatgaatggtggtgatttagtatgatttagtattcacggtgtagagcagagacctgagatgaagaggtgcctaggcaagggatggtggtcagggcttctcagaaaactttttgtgtgaacaaaaaccatacatactggagaaagatggaattaactgattcaacgttacaataatcatagaagcaacagcgggaaactgctcttaaaagttattccatccaaacttgttttgaaccattcttatttcacagagtttcagatagatgaatgtgtttgtccaaggtcaacttggcagtaatgaaagagacttcctctctaggtctcatgctctgagacaaaaggttatacataaaacagaactggctttagttctcagcattacaagtttctggtctcagcaactaggaagccagaggaggtacattcaccgcctgctgagaactttcaacttcatttccaagaggaaacctcctgcaaagggtgtgcgactgacttcataattgcacttctttggcctgcagtgctagtgttctaagaagatccttctgaaaaccttcatacttaaagcagtcctttgtactcattagcgatttattaactaaggagagcagtttgaccgcaggatatctactacttgcttcaagcccatcataatatatagggagagaagctctttgccttcatttacattttagtacattttctcccactctcaggtagattttctttccctgcttaaatttttgatctcctctcagtgcacctcctccactggatggaaaaaaaaaaacaaaacagattcataaaaccatccagtttcataaatataactgcataagtgtgccctgggcaagggtcacaccaacagacataccaaagtggatgggggaactcacacaaggcttcaatcctaccaaaaatactataggcaactaaagagtgctgagagctagagaaataatcttaaaccaggaagagtacaccagtgagttttctaataccaaatggtttgctttgacacatatatccagaaatattatgcaaactgagcttattatacttcttcatataaatgtatatacatatatgcatggaatctcaaaattagtgaaaacaaataccatgaatttggaagagagaaagaaggtatattacattgtttggagggaggaaagcaaagagggagattatgtaattatttaatcataaatatgaaacaaaacaaaacaatgtaaacagatttttcccaggaaacatttacatacagagcagtggcattgcacacaggattttaccctcagtcgggtggggaatccttgtatcatctataggttacttttgaaagtattaaagtattagaaacaagtttttaggatcagttattctaaattaacatttttatattcaagaaaatcgaggctcactgaagccaaagccatacgacaaatttaaaccccgtctagagcaaaaccaccacagttgtgcaatttaccaaaagtttcaatatcaactcagggggaagcattgtatgtgtaatgtaagagtgtaaactaacatcttaggaaaaggatgcaataacagttcagaaacaattggtttcagggtagttcataagctacattcctgagaataatcctgactgatttaatcctgctcttatctgcattgacttgaattttaatctttaatgttcagttttataatgtttaactacatgtaagtgtgtgtgtttgcatgtggcaatgaatataagtgtaagtacctgcagagaccagaggcttctgttatcctagatgcagacttacagatggctacctgactagagtgctggtagctgaacttgggtcctctaggcgagcagcaatagctcttaacttttgaaatatttaggtagccacccaagttttaattttagtagggtataattcttgagaatataattattctaaataagaaaactatgtaatatattttagatatttttactatatatatacatatatatatatatatattagagttcttttggataatattaaaagggtaacagtttatcaaaccaatttaaaacaagtcattttttggggggaaaaacttttgattcaacttctctttaatatattaatgctctcctactttatccatctatcccagaatgtctagactatacctggattcctctattcctctatattattatggattttagtgtcctcaagttttatttgtctaccacttagatatttcacatcatggtaaacaatgtctgtttctacaggtatatatgagaaagaagtggggagaacctatggataagtaaattttgggatatatattttttttccattttttattaggtatttagctcatttacatttccaatgctataccaaaagtcccccatacccacccacccccactcccctgcccacccactccccctttttggccctggtgttcccctgtactggggcatatgaagtttgcaagtccaatgggcctctctttgcagtgatggccgactaggccatcttttgatatatatgaagctagagtcaagagctccggggtactggttagttcataatgttgttccacctatagggttgcagatccctttagctccttggctactttctctagctcctccattgggagccctatgatccatccattagctgactgtgagcatccacttctgtgtttgctgggccccggcatagtctcacaagagacagctacatctgcgtcctttcaataaaatcttgctagtgtatgcaatggtgtcagcgtttggatgctgattatggggtggatccctggatatggcagtctctacatggtccatcctttcatctcagctccaaactttgtctctgtaactccttccatgggtgttttgttcccaaatctaaggaggggcatagtgtccacacttcagtcttcattcttcttgagtttcatgtgtttagcaaattgtatcttatatcttgggtatcctaggtttggggctaatatccacttatcagtgagtacatattgtgtgagtttctttgtgaatgtgttacctcactcaggatggtgccctccaggtccatccatttggctaggaatttcataaattcattctttttaatagctgagtagtactccattgtgtagatgtaccacattttctgtatccattcctctgttgaggggcatctgggttctttccagcttctggctattataaataaggttgctatgaacatagtggagcatgtgtccttcttaccagttgggacatcttctggatatatgcccaggagaggtattgctggatcctccggtagtactatgtccaattttctgaggaaccgccagactgatttccagagtggttgtacaagcctgcaatcccaccaacaatggaggagtgttcctctttctccacatccacacaagcatctgctgtcacctgaatttttgatcttagacattctgactggtgtgaggtggaatctcagggttgttttgatttgcatttccctgatgattaaggatgttgaacattttttcaggtgcttctctgccatttggtattcctcaggtgagaattctttgtccagttctgagccccattttttaatggggttatttgattttctgaagtccaccttcttgagttctttatatatgttggatattagtcccctatctgatttaggataggtaaagatcctttcccaatctgttggtggtctttttgtcttattgacggtgtcttttgccttgcagaaactttgaagtttcattaggtcccatttgtcaattctcgatcttacagcacaagccattgctgttctgttcaggaatttttcccctgtgcccatatcttcaaggcttttccccactttctcctctataagtttcagtgtctctggttttatgtgaagttccttgatccacttaagatttgaccttagtacaaggagataagtatggatcgattcgcattcttctacacgataacaaccagttgtgccagcaccaattgttgaaaatgctgtctttcttccactggatggttttagctcccttgtcgaagatcaagtgaccataggtgtgtgggttcatttctgggtcttcaattctattccattggtctacttgtctgtctctataccagtaccatgcagtttttatcacaactgctctgtagtaaagctttaggtctggcatggtgattccgccagaagttcttatatcctcgagaagactttttgctatcctaggttttttgttattccagacgaatttgcaaattgctccttccaattcgttgaagaattgagttggaattttgatggggattgcattgaatctgtagattgcttgtggcaagatagccatttttacaatgttgatcctgccaatccatgagcatgggagatctttccatcttctgagatcttctttaatttctttcttcagagatttgaagtttttatcatacagatctttcacttccttagttagagtcacgccaagatattttatattatttgtgacaattgagaagggtgttgtttccctaatttctttctcagcctgtttattctttgtatagagaaaggccattgacttgtttgagtttattttatatccagctacttcaccaaagctgtttatcaggtttaggagttctctggtagaatttttaggatcacttatacatactatcatatcatctgcaaaaagtgatattttggcttcctcttttccaatttgtatccccttgatctccttttgttgtcgaattgctctggctaatacttcaagtactatgttgaaaaggtagggagaaagtgggcagccttgtctagtccctgactttagtgggattgcttccagcttctctccatttactttgatgttggctactggtttgctgtatattgcttttatcatgtttaggtatgggccttgaattcctgatctttccaaaacttttatcaagaatgggtgttggatcttctcaaatgctttttctgcatctaacgagatgatcatgtggtttttgtctttgagtttgtttatataatggattacattgatggattttcgtatattaaaccatccctgcatccctggaataaaacctacttggtcaggatggatgattgctttaatgtgttcttggattcggttagcaagaattttattgaggatttttgcatcgatattcataagagaaattggttctgaagttctctatctttactgggtctttctgtggtttaggtatcagannnnnnnnnnnnnnnnnnnnnnnnnnnnnnnnnnnnnnnnnnnnnnnnnnnnnnnnnnnnnnnnnnnnnnnnnnnnnnnnnnnnnnnnnnnnnnnnnnnnnnnnnnnnnnnnnnnnnnnnnnnnnnnnnnnnnnnnnnnnnnnnnnnnnnnnnnnnnnnnnnnnnnnnnnnnnnnnnnnnnnnnnnnnnnnnnnnnnnnnnnnnnnnnnnnnnnnnnnnnnnnnnnnnnnnnnnnnnnnnnnnnnnnnnnnnnnnnnnnnnnnnnnnnnnnnnnnnnnnnnnnnnnnnnnnnnnnnnnnnnnnnnnnnnnnnnnnnnnnnnnnnnnnnnnnnnnnnnnnnnnnnnnnnnnnnnnnnnnnnnnnnnnnnnnnnnnnnnnnnnnnnnnnnnnnnnnnnnnnnnnnnnnnnnnnnnnnnnnnnnnnnnnnnnnnnnnnnnnnnnnnnnnnnnnnnnnnnnnnnnnnnnnnnnnnnnnnnnnnnnnnnnnnnnnnnnnnnnnnnnnnnnnnnnnnnnnnnnnnnnnnnnnnnnnnnnnnnnnnnnnnnnnnnnnnnnnnnnnnnnnnnnnnnnnnnnnnnnnnnnnnnnnnnnnnnnnnnnnnnnnnnnnnnnnnnnnnnnnnnnnnnnnnnnnnnnnnnnnnnnnnnnnnnnnnnnnnnnnnnnnnnnnnnnnnnnnnnnnnnnnnnnnnnnnnnnnnnnnnnnnnnnnnnnnnnnnnnnnnnnnnnnnnnnnnnnnnnnnnnnnnnnnnnnnnnnnnnnnnnnnnnnnnnnnnnnnnnnnnnnnnnnnnnnnnnnnnnnnnnnnnnnnnnnnnnnnnnnnnnnnnnnnnnnnnnnnnnnnnnnnnnnnnnnnnnnnnnnnnnnnnnnnnnnnnnnnnnnnnnnnnnnnnnnnnnnnnnnnnnnnnnnnnnnnnnnnnnnnnnnnnnnnnnnnnnnnnnnnnnnnnnnnnnnnnnnnnnnnnnnnnnnnnnnnnnnnnnnnnnnnnnnnnnnnnnnnnnnnnnnnnnnnnnnnnnnnnnnnnnnnnnnnnnnnnnnnnnnnnnnnnnnnnnnnnnnnnnnnnnnnnnnnnnnnnnnnnnnnnnnnnnnnnnnnnnnnnnnnnnnnnnnnnnnnnnnnnnnnnnnnnnnnnnnnnnnnnnnnnnnnnnnnnnnnnnnnnnnnnnnnnnnnnnnnnnnnnnnnnnnnnnnnnnnnnnnnnnnnnnnnnnnnnnnnnnnnnnnnnnnnnnnnnnnnnnnnnnnnnnnnnnnnnnnnnnnnnnnnnnnnnnnnnnnnnnnnnnnnnnnnnnnnnnnnnnnnnnnnnnnnnnnnnnnnnnnnnnnnnnnnnnnnnnnnnnnnnnnnnnnnnnnnnnnnnnnnnnnnnnnnnnnnnnnnnnnnnnnnnnnnnnnnnnnnnnnnnnnnnnnnnnnnnnnnnnnnnnnnnnnnnnnnnnnnnnnnnnnnnnnnnnnnnnnnnnnnnnnnnnnnnnnnnnnnnnnnnnnnnnnnnnnnnnnnnnnnnnnnnnnnnnnnnnnnnnnnnnnnnnnnnnnnnnnnnnnnnnnnnnnnnnnnnnnnnnnnnnnnnnnnnnnnnnnnnnnnnnnnnnnnnnnnnnnnnnnnnnnnnnnnnnnnnnnnnnnnnnnnnnnnnnnnnnnnnnnnnnnnnnnnnnnnnnnnnnnnnnnnnnnnnnnnnnnnnnnnnnnnnnnnnnnnnnnnnnnnnnnnnnnnnnnnnnnnnnnnnnnnnnnnnnnnnnnnnnnnnnnnnnnnnnnnnnnnnnnnnnnnnnnnnnnnnnnnnnnnnnnnnnnnnnnnnnnnnnnnnnnnnnnnnnnnnnnnnnnnnnnnnnnnnnnnnnnnnnnnnnnnnnnnnnnnnnnnnnnnnnnnnnnnnnnnnnnnnnnnnnnnnnnnnnnnnnnnnnnnnnnnnnnnnnnnnnnnnnnnnnnnnnnnnnnnnnnnnnnnnnnnnnnnnnnnnnnnnnnnnnnnnnnnnnnnnnnnnnnnnnnnnnnnnnnnnnnnnnnnnnnnnnnnnnnnnnnnnnnnnnnnnnnnnnnnnnnnnnnnnnnnnnnnnnnnnnnnnnnnnnnnnnnnnnnnnnnnnnnnnnnnnnnnnnnnnnnnnnnnnnnnnnnnnnnnnnnnnnnnnnnnnnnnnnnnnnnnnnnnnnnnnnnnnnnnnnnnnnnnnnnnnnnnnnnnnnnnnnnnnnnnnnnnnnnnnnnnnnnnnnnnnnnnnnnnnnnnnnnnnnnnnnnnnnnnnnnnnnnnnnnnnnnnnnnnnnnnnnnnnnnnnnnnnnnnnnncttactgtttttaatattcctatctttatttagtgcatttgttgttcctgattattatgtgtcgggaggaattttcttttctggtccagtctatttggagtctctgtaggcttcttgtatgatcatgggcatctctttttttatgtttgggaagttttcttctattattttgttgaagatattagctggccctttaagttgaaaatcttcattctcatcaattcctattatccgtaggtttggtcttctcattgtgtcctggattacctggatgttttgagttaggatccttttgcattttgtattttctttgactgttgtgtcgatgttctctatggaatcttctgcacctgagattctctcttccatttcttgtgttctgttgctgatgctcgcatctatggttccagatctctttcctagggtttctatctccagcgttgcctcgctttgggttttctttattgtgtctacttccccttttagttctagtatggttttgttcatttccatcacctgtttggatgtgttttcctgtttttcttttatgatttctccctgtttggctgtgttttcctgcttttttttaagggcctgtaactctttagcagtgctctcctataattctttaagtgacttatgaaagtccttcttgatgtcctctatcatcatcatgagaaatgtttttaaatatgtgtctagattttcggttgtgttggggtgcccaggactaggtagggtgggagtgctgcgttctgacgatggtgagtggtcttgatttctgttagtaggattcttatgtttgcctttcgccatctggtaatctctgaacctagctgttttagttgtcactgttaagagcttgttcttcaggtgactctgttagcctctataagcagacctggagggtagcactctccttagtttcagtgggcagagtattctctgcaggcaagctctcttcttgcagggcaggtacccagatatctggtgttcgaaccagactcctggcagaagttgtgttccactcactagaggtcttaggatcccgtgtggaatcctgtgtgggcccttgcaggtgtcaggcgactcagctggcaaggtagcccggagctcgagtggagcagaaggggtttgtgccctacatcaagcccgggtagcctgcttccctatgtactgcagtctcaggttccgcgagattggattggggcaggcgctgtgttccactcaccagaggtcttaggatcccgtggggagtcctgtgtgggcccttgagggtgttgggcaagactctgctggcaaggtagcccggggctcgagtcgggatatatcttaagtacttttactacttatttgaattcgatttcctttcaatgaataatcttttttaacttttatttttctacttgcatattacattctaactggttctcccttcctccannnnnnnnnnnnnnnnnnnntgggccagtcccacaagttctgtgccacagttgcccctgccaagtatttgcaggagaggcagattgcatctgaagatttcgtggctgcgttgatgggctccatattccttcttactaggagtctttgctaggattgccttaatagatttaaaggagtttccactaccctaagtttctacatcataccctgcagacaaatatacacccatgttctctctcagtactctctctctctctctctctctctctctctctctctctctctctctctctttctctgtgtgtgtgtgtgtgtgtgtgtgtgtctttgtgttcctcccacccttaacctaattactcttgttcccttcctaatctgtccccaatcagttgcataacctattctacttttcccttcccaggaagagccaggcttcgggacttgagccctcatttttagttatcctatttgagtctgtggattgtaatgtaattatcctttacttaacagttaatgttcacttacaagtgagtacataccatgtttgtctttataggtctggattaactcaatcagaatgcacctgtttagttctataaatttgcctgtaaatttcatgacaatattattttaacaactgaataatactcggctgtgtaaatgtaccacaaattctttatccgttcttagggtgaggggtatctaggtcatttccagattctgactattatgaaacaggaagtgaaatgactgaactttagccatcacttgagatttaagttctgagatgattgaaaccccccttctcctacagaaaggtgaaatgtctttatttttcttctgaatatagtgtttgcaaagagctgctgatttgcatcatagcatacacattgataacactttgaaaatgaatgctatagtggtttcctgtatctgtgttcataaagcacaaaaccagattttcttggaatacttatttagggtgatccattttttcgacatacatttacaacagttcttgtgtgttgaaaacagacacaatataagtaaatataaataaaatataaaatacctcaaaataaacccccttgagaagttttgccatcaatcagcaattgggaatgaattctttaaaagaattccaatggttagtcaattgaaattcactagaactgtttaaaacataacatttgaaccatgaagaatatcttaggttggtttgctctcaagaactcagctgttttgattttccattttattatttcaaatggtgcaaaaatttcctgtatttacattttctgcaccatttatgtttcttttcaaattacagaaatatgttagaaaaatagcaaactactctttaaactatgtggtctgaaaaaatttaaccactaactggaaggcagagagctatgaattatatatttttttcttgtataaaagccagattataataggtcaagggtatagttagtgaattaatgtacaaaacatgtggggatatagttcttgataaatttgaacaccctctctatcaggagatctttgttagttcatgctctatgcaagcactagtctataaaagatgatgttttaggtttctcagctccaatttcaataaggcccacttcagtttcagggatttatgtaaaggttaattaaagtgatttcttaacctctctatgatgagtatacattgctgcgttgtaagctcctccataatatgatgttaccacagtagtgatttcctgataaatgtctaataattaagtttaatgaccaaaagaaaatatacaaatacatgtttctaataaattttctggttataaaaatgcagattataattaaaagctatatacgtatgtatgaacctatttactaaagaaataattaaatattaaccatgatatattaaatttatgttattaaaaataaactgattttcattaaatattattactttttgaaaaattcttattaattttgacaaacatttacaaaagaaaactatttcattatagtaattaatggcacaaatgtttggttcttttatttaattaaaaaaatactgagtttttctttattagatgtaccatttacagtgtgatgccatacgtgagaacacactttgaagtgtaatctacatcaatactttcttcatcactgctttaaaaatacatgaattaaacaagatgtcagccctaaatttttagcattttccaatagtcacagtagagtagattataaatccccaaggagatcttaatacataaagagtatagtaagagaaactgcacaatgtttcttccaaatacagccagaagaaactggtaatagcacaagtgtgcaaataattagaagttgtaagtcttaatatgcattactttattatttacatagctaatttaaaattttatttgtctttaattatggttgtacatgaaactgacacataaaattcttgggaattgaaattgagtttgggcttctgcaaaagaagtaattactcactattgataattatctcatcacttgcaaagcactcactacactaagaactgtcccagagtggttcttgagtttggtggcataatattcacctcatgtgcatcactataggttcagtgtacagtttgctaaaatggcttcgatttgctgaagtattgtttagtcattatttataaataacagaaaagaatgacctacttttagcaaattttgtgatatgagcaacattctaatattcaacttcttactttaaagaagtgattctgaaatgatgggtgtaaaatacccagtggagagctgtgccacaccttctaacaagatatgaacattgaacatgattcctgcaggaaataaatgtatattttcctaacttaatccaaagcttagagaaatgaaagtaaaacacttcccattgctattaaaaaaaaaaaaaaaaactgaaataagaagtcattaaaggtcattttggaatgtcaatcatgtcccagcagtgcaccttggcccattaacttctgcctcctgtccattctatcagggagtgacagggcacataagtgtccttggagcactccgtgtgtgtgtgtgtgtgtgtgtgtgtgtgtgtgtgtgtgtgtgtgtgattgtgtgtgtgtgcctgtgtgtgtgtgtgtgtgtgtgcatgtaatgtttattagggagtatttataataactttctttacttctcaattctttcccagtgaatgtcattcttatcttcagccctaccttcatgaactaaactatgtgcttgggctgaatatccaattgaaagcaaattagatgagccagcaagagtcaccttgctagtgactggggagggtttccaccacacagccagggcctcactgaagtagcatgctggctttgctgtggctcactttcacctccacaggaggatgactttgcagtttctccacagcattttgctttttatgttttcctttaatggtgtgacatcctatgacaattatcattattttgggtccaattttccctctgaagcagctttgacacagatcaatgcatctcagtgtcgttttttatggagctgcagcatcagaatctgacagctggaaatcttaattggtccagtgacagaaaatataatgactgctcacagtgacttattttatctgaccttgtgtttaattcaaaggtaaattttaatctcactattggaaatgggaaagttgtggggcgataagtgaggcagatggaccagagaaaggcccttcatttagaaggaaattactactggttgtagggctgttattaaattagtgcttaagtgctggctttgaatgatggacaccaagggtccccatgactatttgaactgccaccctttctactgtggctgtcattacaaatggcagtaggcacagaatgtagcatgggatgatggagacaagtgagtggctggaggcattatcacaaaggccaccagacagctgtcatacagactggcatttgatcattactgccttggtccagagcccagtgacactgttctagagacaaaaaagttttccatatataccctccaagttaattccatcttcctaatcctacaaaggaaactgtttctaaaataagaaccttagatttgttcacttgaacaaattaatccatgatttcaaaggtcctattaaaactttaatgtatttagttaatttaatacaatgacataccacgacaagagggtgctgtgacaagctgatcaacactatgattagatttacaggttaactgtgagtgtcacttcctggatttgtctaattaactgcatattctgagaactaagtggtagagtgtgtgtttaaatgcttggatgacttcatgatgattagaaagatgatagggtaattgtggcaaattaaatgttgtattgtatacaatattcatataggtttagtatccaaagagttgcctataacagtcttaccaatggtatttaaaagcacaaacatttatttttgaacaaatacagtaaaaacaatgccaaggttttgaattttaattttgaccccaatagtcttgaactagcaagtcaaattatatgcacacgtgcacacacacacatacatgtaataattattatatatatatataaacacatataaatttcaaagtaaatatgatattattcattatggtatactatacattctgcataaagaagataattatcatttgtaaagtacatggtttgaggaatattttcttagtgaagtaatgtaatgtcagaaaggcaaatacagtatgctctaactaatataatgacccctaagcagtgaaactactcgagttaaagaacacattggcatgacgtggggctgccctttatgggaatgaggaggtaatgcagaatgaatagaacgcttggtcctgacaggaagaaaatgtttccaaggatgacacatataactaataaatatgtattatgcatcccaccatcactaagtaaattgctgatatgctcatcataaaactattaagtacttgagatgctcagtgtgttgattagcttcattaaattgcattatattaacaattaccacatcttgatctggagaagtggcttaagacctaagagcactgcctcgaccagcatagaggcccaggttgagctgtgatcctagcactccttgtaacctataaaaagattaatgtataacatttaacacagagaacctctgtaacataatgtggttgaaatgattaaaagaagagatgagaatcacgtagcttaatgcttaatatatttcaacatgtcaatactcctttcaaatcaacaaccccaaaagattttgataaggtttgtcatgcagtagtttagttcctgtactttccatcccaacattggaacctttaaagagaaaaggagtctgttcagaccactctggaaaatgactaatgttgggcccttgacattggtataactagtagtagtcacaaattctatgggagcaaagtgttccagggaaaaagaaaagccttagttattcttagtctcatgattcttcacacacacacacacacacgcacatgcacacacaccactcatcacttttgtatgcagcactttcattccctctagggttttatatactcagattcctcttcctgtaactgttgccatgatgtttggacaaacttgacaccataaacatggcctaaggaagctacagaaaggctactatcaagttgtttgacaaagttggctgtcaggagaatcccttgacctccagagattggctagaagcagcttgagggaactggtggcatacattttatcagctgtatatcctagaacaacaagttctctaatgttgtaagtctctgatgcatttccatggccagtctgtttccttgagataccgtgattattagaatctgtggctaattcactgactcctttaaatcaaaattgtttcattcatagaatttggcggttagctccaggatctagattgtgtttactgcttattgattcccatcattttgttgttttctattcttcctaaacagttaagaaataaaattcatttcatttattcactcatcttccccgggcaggagaatcactggaaaccaaccaaccatcaggccttggtggatcacttttcagtccactgacaaacttagctaatgtaagaaatcctagctggaatagccatggtcctttactcatcgatgctttcagacactcgctttcttaaaggaatgctcgaagctacgatcttgataaagttaagcactgagttagaggcatcatgtttctctcggtcccatagctaccgactttttttcctcatgcaaaattcaagccactcatcagagctgatcagtatacttttcgtgttcttcttagccacatattctcttctccatcaagatttctttgtagtaccaggtgaaatagaccttaccttgtgtaggaagctttccagcgtctgcctttgttcattcataaaaaaaaaaaaaaaaaaaaaaaaaaaaccaaacaaatgatgggaagtcatcaagtgagtctgtggatgggttacattaaaggaggatggcattatttctccacatgacagatgttagggtgtagctaaacacctcagttaactttcagagtataatagagtagctgtctaccttgcttgaatttcagaacacctaaaacccatgtcatgccctcaaaaccttcctatttctagaaatgaagatcatagaatcatttctgttaggagaccttttgtagtcaatggctcccttctcagaaaagattgtcagaagtatgaataaatgaacaagttcgtcagaacatctggaggcttcagaaaagtattcattttgcttcagatttctattttgctaaagaggaaacattttgtacgttgagataattttttgctgagttattcctagagtaatgaaaacttaactgctggtagtaaatggaggtaggttaagtggcaaaaatgggaggaagaaaatggaagaggaaagtgttgtaattgtgtatacacacacacacacatatataaagaaagagttaagcaaaaggaaacttttggatcaagattatattggttaaaaataaacttaaagttttcaccgtctgttttgctcatagttctaggtgttgttggtgatttgagtcccactcctcgggagggaggtaggcttgtactaaatatccaaagtcacttggaactccctgtatagtcctacttcattttaaactcctcatcctcttgcgcttaggtctctgagtgctggaattacaagtaggaaaacaacctttacacttttaatacttcatttaaaatgagcatccactagttctcactgtatacagaagccttatcagaatactgtgcaagtccctgaaagttatgtagacacaatatatttgcaaagtaagactcacccatatcatacattcaggtagtactcagatcctgttatgtagttttgtgaaaagaacactgtactgcccagagagaagtccccatccacactctctgcttctgggcttgtattctagttctacacacaatgagtgttcttgttataactggtataggcaaattgtatagcccaaggcaaatcccttagtcgcatatatcttagttcaagagagaaatctagctaattgcatttggttgtctctctctctctctctctctctctctctctctctctctctctctctctctctctctctctctcttccttttccatttttcttttaaaaactgttcactgttgaaactaattttgtggaagtaggtgttggacccagatgagttagagttaagattaaataacaaaagttaactggaactgtatgtgaaaaatcttgagtgccataatagtaatttatagccaatgaagctgtttaccattaatataaatataaaagctgatctttttccctggggaatagtctgtggttgatatatcttaccactaagagtaacataatatagtcattgatagtattgtattgcccctttcccaaatgttgggcattttggctaatttggagtacaattattaattagctcttctttgaaagtttggtagaactctgcactaaaatcatctgacactggactttttttttctttttttgagatttttaatgatggtttctctttcctaagggcttattctttaaatagttcacctgatcttgatttaacattgatacatcggaactgtctagatcaattcaatcaatttcaactaatttttccagttgtgttgactaaggtttgatgatttttaaaaaattgtcctcagttttttatatattatcttccctttcctttctgattttgttaatttggatactgtctctctgcttttagttggttccactaagggcttatttatcttgttgattttcacaaagaactagcttatgttttgttttgttttgtttattctctgtatagttatatttgtttataaatggttgatttcagtcctgagttggaatatttactatagtctactcatttttggtgtgtttatttctttttgttctagatcattcaggtatgcttttaatttgctagtatggaatctctgcaatttctttatgaaggctccgaattttcctcttattactgctttcattgtttcccataagtttgggtatactgtgtattaatttttattccaataaaaaagaaaaaaagaacaatcttttcattaaattctagaaagcctttaatacttttctttatttcttccttcagtaggttaccattgagcagagagttgttctgtttccatgactatgtgggctttcggttatttatgtagttattgaagaccaaccttagtctgtggtgatctgataggatgcatggaattatttcaatcttcttgtatatgttgaggcttgttttgtaactaattatatatggtcagttttgcagagggttccatgtgtgctgaaagaaagttatattgtcttgttttggagtgaaatgttctgaagatagctattaaatttatttggttcataatttctgttagtttcactgtgtctccatttagtttccatgtctatgacctgtccattggtgggaattggttgttgcaatctcctactagtattgtgtgaggttcaatgtaagttttgagctttactaaagtttcttttactgatgtaggtgcccttgcatttggggaatattcagaattgagacttcctcctggtggatttttcttgtgatgaatatgaagtgtcattccccatcgcctttgataactattggttgaaattctattttattccatattaggatagctactctagcatgtttcttgaaacctttaatctgtggtagtgtctctatttgtcactgagatatatttcatgtatgcatgcaacacgatgctgaatcctgtttatttatccagtcttctggcctatatttttattgggaattgaattcattaatgttcagagatagtaaagactgatgattgcttattcctgttatatttgttgctgaaggtggcattggtgtgtgtgtgtgtgtgtgtgtgtgtgtgattctcttcttttgggtttgttgtaaaatgtttagtttcttgtgttttattcggtgtaattacctttcttgttttggagttttccttccactatcctctgtagggctggattaggagaaagatattgttaaaatttggttttatcatagaatatcttggtttctccatctatggtgaatgaacgtattgctgggtatagtagcataggctggtctttgtgttctctgaggatctggatgacatctgtctcagatcttctagctttcacaatctgttgagaagtcttgtgtaattcatatgggtttgcctttattatgtcttttgcccttacatcttttaatattctttcttcattttgtccatttagtgttttgattattatgttatgagagaattttattttctgtttcaatctgtctagtgttctataggcttcttatacatttatgttgatctctttctttatgatagggaagttttctcctatgatcttgttgaagatgcttcccggccctgttaactgggaatcctcaccttttctattattcttagatttgaccttttcattgtgtcctgaatttcctggatattttgggataggagcttattgcactttgtattttctttgactgatgtgtcaatatcttctatggtaagttctatgcttgagattctctcttctctctcttgtactctgttggtgatgcttgcatttatagctactgatctctttcctaagttgtccaactccagggtcttccatttctattttctttattgtttctatctccatttttaggtcttagacaattttgttcaattccttcacctgcttgattgtactttcctatatttctttaaggattttattggtttcctctttaaggacttctacatttttccctgtgttttcttgtatttctgtaagggagttatttacatcccccttaaattcttctatcatcttcatgagatgagttcttaggtcagaatcttgcttttcaactgtgttagggtatccagtccttgctgtggtgtgagacatgggttcaaactgtgccaaattgcattagtttctgttgcttacctctcaccatctggttatctctgtgtcaactggcctatgtgattacatgccttggaggcatgtagagctctgtgacataggttagatccagaatcctaggaatcaggaagtgctctctctgattaggtgtagggtggtcctatgtgtcttgttagagcaggcatcctgtgtccctgattagggtgaaacaactgggttcctgattcgggcaaacctcctgggaggacagacaagctttgggatcaaagggcaggatctttctcagttgcaaatggggataaaaaccagaaagactgttcccttggctaaggcagatatccagtgtccctagttacagcacacctcctgtgtccctcattactagagacctcctgggagacaggcagggtgtaggatgtctgtggctatgtggcccaggttaagaagcagaccagaaggaagataatgctcactgtgtgtgtgggggggggggagctctttggatgtcccaaatgacatggttatttgagcaggagtcacacctgtgtagacctcctgggagacaggtagactgtggggtatgtgaggttatcatgtcctgctgatttggtctgagtggagaaacaatataaaaatgatattgtattgataaccaaaaataaaataaaatataatataataaaaataaattccctaaattaagtatcaaaatggataagacattttagaacaaaaagggctaattgtttgtttgcctgcttgttttattttactttgtcaatgagtaaccaagttaaatattctaaaactcagtaatttttacatatttgtgatcttgaaaaagttatgcaattcagtaaatctgtttcctcacctgtaaaattggaaaactattgtaattaaactcattgtggtgttgaaaagattaaatgcagtatataaaatattttatatgattttagtccacaagatacccccacaaaatctagcagccattgttccattattactgcagctttaatttttacctactgtgctaataatctttgcatcactggataaataatcatatgagtagtgagaactcatttttaaggtgatatataagatatgttttatagccaaagtcacaatgaacttaaattattcctttagaaaaactacagtagtcgcaaaaatgttttatcttatgctttcatgtagtggaaatattggaactaatttgtatgctttttaaatattcagtacttatagttcacataatccatttggcactctaggtttgaagcaaaagttataataaaacaagacagtacaaatggctaataatgaggcaggatagttggttcagagagtaagagtgcttgcttataactcttaggacatgggtgctagccctagaatccactactggaagacgataaatgagtcctgcaaattctcccttgacctgtaaatatatggcatgaatacagccacatgtgcatgcacactgcaccacacacacacacacacacacacacaaacacacacacagagagagagagagagagagagagagagagagagagagagagagagagagagagagagagggagcacatatggaatgagaagagacacacatagagcagcacaccttcagcttgttaggatatccgagcccacggaaatgagatggtgtttttgaacacataaatgaattttttctttaatggcaaacacttttgatgtgtttagttccatcttaaaatctgagataatttttactacattaaaacattactatgtaattagagaaaactgtaaaatcacagcctgtgaatgcaagtcacaaaacataaacaacattgacttttgtgagttcctccagtaacaatttgtttcacattttattatttcttaatgtgcaagatgctcagcaataatttttttaaaaaattatgtagtaaaatagtacaaacttaagtcaatatgattaatttactttgccacacaaataaaatggggatactgacttatttttattatagcaggaaaatacagtcctgcttgtcaatcttaaatgttacttgtagttgtaacttctgaatcatgagccacaaacaagaaaacaaagagaaagtgttgcatgaatcaggtacactcatatgctttaattacagcacattcaaagagacacagaggtgatatttttctcatgggcataatgagaatcaactgtgaaatgtggttgccaagaaatctaattggacttagactaaattaacaataaaatcatctataaagccaaagagatgacatttatccttggtctaaaatggaaaggcaatacctagattgctgaatttagctcataattgagaactgtaagttcccactttcaagattttgttaccatttttgtgaacaaacaccatactcacacagttacttacttctgttctctaatcatccattatgccaaacataaaaaacaaacaaacagaaaacaagaacaaaacaaaaataaaacaagcaaacaaacaaacaaacaaacaaaccaaaaccaccattttcagatatgcaactctaaaatcttctgagtttctcgtgttgtcattttttagcagtgactgatgcttatttttacatttttatcttactttttttttcagtgcatccgtacttttcttctctcttttggtacctcggcatctgagatgcttttggtacctcagcatccaacaatttattcttgccataacagtgttctgaagttctgagttctgagccttttctaatgcattgaatctatttcatgttgatatgtgtgcatggtgtcagagatcagtcctgttaattcttctccatataggtctctaattatcccaacaccatttccggaagagaatcttcattattctcatatgctatgttgttggcatcattgtcaaatcacagttgatacatttatttctagacttattttttttggtacctatacaatctatttttttaatttttaaagtttatttattttatgtacatgagtacattatggttctccttgaacacaccagaggagggcattgaatcctactacagatggttgtgaaccaccatgtggttgctggaaattgaactcaggatctctggaagaagaaccagtgctcttaaccgctgaatcatctctctagctcctatttttattttttataatttctctaaatattttataattctcaaagttactgtgattttaatgccttctgtttttatatcataaaatgacattataaattttgtttctcattatttaaacataaatgagaaattcttttgtatttaaatcaagctgctcaagtaattactttctaacctttgttttctgctttatcctgcatttatgagcgttagttaatagtaaaattactttagaattaccttttaaaaatatggcatgtacagttttgttagaggtgagtcctgctttttaagttttaaatgagaaaataagttatacagtttatagcttagccaaaatatctgagatgaaactagataagacatgaataggctgtcacttaaatatcaattttctagattctaggagtatttaaataaagagtattctgaacatgagtttttaaacacaacactaggtatcagctaaaaggataataacaaattgctttaatattctaagtatatttttttgttttgttttctattgtaatactttaactctgttttgcctatattggggaagcaaactcagcacaaagtctctgataacagtgccatatttcggttatggaactagattattgttgataactactgaatatcacaagtccagtgaggacattctcagaaagatgggatctgattgactattttcacggtgatacaattgtagctgagcttaaaaaaaatgatgttatcaaaaattggttggcataaaacttttctgtggctataacatgtattaataatgaatcatctgctatttatatgagcacatgaacagttgctatcaatatttaggccataattttcataagtacttctcccaagtttgtcttccctttctcatggccctttaacctcttcagctgactttgagctacagaatggaagctgcaattatttaagtttatgtttctttccttaattaattgtatcagtcactaatggatcctttatacaggctgaatttgaatttgtgtgtttcattggttaaaattacccaaccatatttcaaggttaaaagccaaggtatgtcaaactattaattctgcattgctgttgtttgaatgatgtaggtagttgaagctacatcaggagattaaattaatatctgctgtttcatagcccagatttctctatgtttaatgcatttgtgacatttgtcctcattccaggatgaggaaaactcatcagaatgagtgactgactggtcctcattaaactgatgacttccagggagacttcttttatacgcatgcattgaaatattattatcctgaagaatgactatagcaatgagaaatccataaccgaatacacaaacctccatcaatcaaaacaacctaactatttcaaggacgaaaggatacacctggaaaattatctttgttctctgacagagtaataagtctacgctactaaggtccttatgccctgagcaagattctccaatagatgctttagtttctgaaatgtacatggcgtgtgcattgactacttaggtgtgtatgctagaagacagttttaaatttttctgaattcaataatcaactcctgtgcatatgtcgtttatactaaaccaaaagttttccttaaaatttctccacagtataaaattttaattgcaaaacaatcacagtcctaaaagcatttacagaaccttaggtgggaagtaggagataatagactttgtgaagaaatgccaagggaatatatataacatacatccatgacatatgttactaatgtttttttatagagacaggatgatggcatatgatttaataatctctctgggctataactgcagactggacttatagtaattgacatttccttgctaatagcctagacacatgattgtcataattagtatatttttgttttatctcagttaatttctctacagtcaaaattttaaatgaacttatgtatttagtaaatattttagataaatttacacttttgtttcatgttttgtgactataaaattaagattccctttaaagatcataaacaatacattgaaaccagcagaaagaaagaaatgttagtcatgtatttatttattgaattcttatatgaaaattttatatgaagatatcttttgggaaaacaatatggaatttcagtgatggtttgctgattcatagaatttatcataaaccttaagagataaactattgcgaaaataacatgacttatgcctcaattgaatgagtgagattgaagacttggataatgggaccattatccaagatgtgactgacagcagaaaaagcgttatgggagcagtgttatctcagattactcaggagatagagtaactactagtctgacaatgatgacaaagggtcagggagaatgggagccagaagcagagctcaggtggacattctaggtagcaaaaagagttttctgacaacttttgtttggataccaaagaaggtgtggtgtattcgtaatcagagtatcaagtgtattatgatccattggaaaacaatcaacactaattagtattggccagtataaagtaaaaagtacccttatctatagtattgcaaaaagaatggatatttgagaagattgtgttagctctaggagtacagttacataattgagaatctgtgtgtgtaggatctacacagtccagcctagcttgggttgcatgataaggctaccctacccctcctccacagcaacacacttacatgctaataaaagcagagcttctttatcacatgcaacacacatagcgatgaagataatactgtaagaagacagtactgctctatcttaccactttatgggtcaccctttcccaatgtttacatagttagctcatccaagttaagtcacctccactaaaatggaggatctagacaacaggattttatttgagaacctaacaagaaattgtgggcattttaaatcacttagtcacatgaccactttgaaaaatatctcagatggatgcctttacaagagttgcaagggattatgaagaaaaaggacagaaaggaaaaagtttgtctcactgtgatgtatgagttttatttaaggacagtaaaatgacatggaatattttaaaataaagtaacagaattatagactataattgttgatcacacctttgttttttattttggttttgtggctggctgagttcaatcagggcaacctttgtggaatttatggacttttgtggaaatgtccattggagttcgattaactcaacagtgggttatcattactcaatcattactgaagagaatgattgtctcatcaatccttaatgacaatagcttctctgagcatgtccatgacacagcaacctcttccaaccaaaacctgaaagatggtttcctccatcttttgaaggctttgtttgggcaagtgtatctgctatgtttttacaagtactagggtcatgctatatccataaggtagtatttcaaaggatatactcccatacagatcacccttacatccactccaatgttcaggagcacagcataagaagtgggaagaatgtttagaaacaattcctttgattctcctacaactctccttttatgaacagaaactgagctctgactcaagtgtgtgtcttaacaccaaccattaattttcccagtagattcaaagagatgttctgtagtttcacttggtcaattaccaacaagatgaattaagttttaaagtaagaaaaagttaaaatccaaattaaaatttcaaaatcactgcatgctctccatgatataaaacattattgtgaaattatctacaacaagtatttccccagctatcaggatattgtatggtaccaccattttcttacattagcaaatgaaggagaaaaatattcaatgaaacagttcttttactgaaatcccaaaatgtaatttgcttttacttttagatatatattttaatcttctttctgttcagtgttcttttctcaaatatttggctaaagttttaaaaagtattgaaaccaactatagtttaaatgtctccatcttattctgcttcattctccaacctatttttccacatcccataagctcatctcattcttgtctgtaggtcacaacacagatacttatttttccatatacaggctgacaaaataacaacaacatacccccaagaaaaatatatacccaacaaaaactaaaaattatgtttgttgtatgtattaaattatcatactgtgaacaagcacacagtgcccccatatgaaaaatatcacaaatcattttcatttcattatttttcacccttgctaccagctattttttcagacagtttgctatagaaggcaaagcacatgtgtaactttgcctcagttagaagaaatgtactgtccatcttgctttagatttgatgcgttaccaatttgtgagagtttcatttcaatttcattacttggcaagcagaatgaattgacagagaaagcaatcaacacatgatgcacacacgggaagctataatccagaatggtggttgcttctgtcaacacaaccaattaccaaaggtactcactcggaaggtgagtgatagcctagtaagtcacgtggtgctgtgaagcacatcctgcatactggtaatgaattcatagttgacaaagagtgacagtctgcctgtcagtgtcaaattccaggttcattcctgtctccattgagttctcaatgaaaacacaaatgtttgtggtaaagcaagagcttattgttgaagatagtagtgtgtgtgtgtgtaagaaagttagagacagagagataaagacctggaaaactccagagattaaaaaaaaaaaaaaaaaagactggttttataatgatatgagcctacaaaagacacagcaggaaaacttttcttttttcttttttttttaatctaatctttcccactgtatggattgcatactgtgctggagaatgagtgttaaaaagacaagtctgactctgactcctaggagatcattgatctatactttgaaaataacaaacactcagtcactttttaaaaacaactattcattcctacaaatagatgctcttttctaagtaatgcaatataaaattaatgaaatatacatgatccttgtcttcatggaatacatagtttggtaaaacaagaagcaaactgagaaatatgaactgttgttgtatgagacagagagagtggaggaccttatagctgtgttccaggtattgagagagtgaaaatattaggaaggaatgactggtaaaccaagtatcaacctataagtccttgttagctagagaaactgggtttcagcgcttcctactcaagtaaaaagatgatagaaaagagcttcatacattttagacatttagaatttctttagggctgtatgtattatgcagttgggtttgggaagactatagaaaacttttgtgctaaagaagtaaacatagataagtcacttttggtacagcaatgaagtttttcctagtcagtgctgacagaataatggcatgacctatctagataagacactgtaaattctagtagaagattttgaggatgacatagaaggacttgcagattctgagtatattatgatcttaaaataattaagaagaacataaaggtagaggtaaatatctaaagtacttgatgacatatttatagaaaatgcaacttaaattttactctgcatcttttagaaagggctaccctctggattggacattgagtgataatgtagctagcataagacctagcttcaagcttgcaatggggaaatctgctcatgctctggatagttgatgtgggtttaccaggtagtaatattctgcttgacataaattcctgcttctgttacaggataagggtcttgatttgtttaatttgctcagacttacaggtagcaggggaaaaactttgaatacctgaaacaggagcaatgtgaaccagcagttgaagaaagcaggttttattgagggtaatgattcacatattcacacaagataaaatgaccctctgcaaagcagaaaggggattcagagagccaaaaactccaggcacttctggtgagcttacttttttcttcctctcttaatttagggctggtaagtttgatgaaagctgggatgcttgattggcccacactgttgtgtgtcatatcctgagcaagcatagaacttgtttaatttgtcaatcagcagtgattggggtactggttgaaaacaaagctaacaaaatctttattttatgttgcaagaccctttactccagtcaggagggtaaggaagaagccaaacatgttggatattgaccacctttattacataaccatggcctatcaccctgtctgcctaaaagagaatgtgtaactcctagtgtctctcaaaaaatatgaaatgatttcagtgagaaccatagctcacttcacctttatatcatgatcagagggtggcctgagacattgaaagttgggacatcaatttgatatgcaaaaagaatcaaatttgaaatcagcggtttgcatagtcataaaatgttcgtctatatcaaaattgaagaaagcaggatgcagaagccatttgaaatgaaaaaccaataattgtcagattgccagttaacacatttcccatcttagttgcataatttaaggttatatatttgaccaccagtgatctactaagaacccacatcaaagaaacaatattatcaacagtatgttcttattatgtccttggtatgtgccacactgaaatctgtgattatttaaaccaaacaagccacaaaacacatggagcattcctacagggagcagaaattgataatttagctgaggaataatattttgccagttaatgttatttaccaaaaatgtaacaaaatattgatacgctggatatttgtctgaataatctttttgtagaatatttgtgtatttttgtgtaattaaatttttagcataatcttcttatcagcaaaccatcactacatcttcttttcacaatagaggcatctttctgagtggatgtgtctacacacgttattggcaatccatgctccatacttttatcattcttactaaaagtcttttttaaaaaaattcatacaatatttactatgctggctaggtttatcctaatgtgacacaagctagagctatcgaaaagaagggagtttcaattaagaaaatgcctgcttaagattagactatacatgagccagtagacatgttttttcctgtttttctctcctcctcctcttcttgctccttcacctcctcctccaactcatcctcctcctgctcctcctagtcctcctcgtcttcctccccttttctttgttagtgatagatgggggagggcttatccctttgtgggtagtgccatcctctggatggtgtcctggattctataagaaaggaggctaagcaagccaggagaaaccagacagtcaggagcactccttcatggcctctgcatcctgcttctgggtttctacactgtctaagttcctattctgacttctttctgtgggcaactatgatttgaaagtgtagtccaaataaactctttcctcctcaaccttcttttgatcatggtgttttatcacagcactagtaatcctaaacaggtcatataacttttcatattataagtattttaataacaaatatccttatagcagtatctatgcacatatattatttgttacaggagtttagtttccaaaagtgttttaaatatgtcttgatacataatgaaaattactttctagatttttgtgttttaactgtttagaagtgttttattcattgagctgatatatgtatctgtgcacatgccactagaatgtggaaatcagatgataacaagcaggaagtagttcttgcctcccatccagcagttattagggattgaacaggtccatagatttggtgggagaacacataactgcctgaaccatctaaccagccctacattttaattgtacagataagtctaaaatggtgtgtgacatgtctgacatttctagttgctgcaccttttactgtctggctcatgtttattgccaggaggcttctgtcagacatcagctgaacactgacacagccaggaacaactgccttcattcaaataggttcaatattgctctcaattttttgtctctatgaatagcttctacattcagggcatgttgtatagccccaactgtactatcgccttaacttccaacttttcaacttctaccttcaatgcacaggtaaaaaacaaatgcattataacagttgttgattagccactataaagagaggaggaccgtgcacaaagcttccattacttgagtatataaatttcactctctaagtttttttttaatataaaaaaaattaaaagcagcagaatacttccactttctttcctttacttaactcccaaattgaagtctaggatggctgccaatgatattatatcatcccatatgttttgcttaattatactatttcctgatttcaatttttgaagttaagtttttttccacctcatcatcaaaacattatgaacactctttgtcacactgagattagaagataaaacatcttttaaagttgtatctatttgaaatatttctagagttttggaaagataacgacttaacactctgatcatttaaatctatgctgcaaatcacaaagtatcagaatcttatggtacatagaactgagttaatttaataggcaaacacccaatgtgttccagcaaggtttagatgtcttttcaatttgaagtacattttcaatttatagtatgataaaattcaagatattttctctaataaattgatcttgcttctatgcatggttcatgtatcagtataagaataacatctacatcatattaatacctgtattatacagaacattaagatgcatcataagtcatccagtatgccctctagggaaccttataattcttttttatttttatatctttgacaaattgttaatgatcttgagatcactggagtgtatttgtttacatatctttaaaaatacattctagatggtaaatgaaatatttgctaacaaaaattacgtcacagctttcctttttagtttaactctaccttcttttatttttaaaatgtaaagataaagtaagcagcattaatattttcaagttgtgactatacctatagattaaaaaaccacagttaatactttcaagttgtgatattttcaagttacataatgctatttgaatttattaatagatttttctctttaaatattctacaccttctctactggtttggtatataacctacttccctgtatataccttaaattcctttccatcatttatcttctcaagtaactctttctatttgcataactatgaataccaagaaaggagagtaaggatagtgacaatggcactgaaacctcttagcaataaagtgtgaaagaatgtaagaaaaaaaatgggattaaagaacctactcagcaatctcaagactaaagattcttggaagtgagtgttttaatcaacttggggaaaataggagcaacacacacacacacacacacacacacacacacacacacacacacacatacgtgtgtgtgtgtgtgtgtgtgtgtgtgtgtgtgtgtgtttatattatcctattatataaccacctcctgaatggctctagatgttgagaataggacagcctttaagcaccgtgtgaataaaaagggtttctaacataaattgatttgaggcagaagaaatctcatcttaagttcaaggaattcacacttaaatcaacatttcagaaattattaaccatttgaaaaaaacacaaataaaacgctagactaccaaacttcaaaaagtattagtaatatcataaagaataaaaccatccatgatctcttgaagccccacaaatgatctttgatatccaatagctgatgattctttttcttctttctcttttcctctttctcctcgtccttcttcttcctccttctgctacttaatcttaattcttcccctccaccactttgtgaggcagaatattttgtagtacaaattggttctttgatcatcttgcctctgattcctaagcttcaataaatattttgaaaattatataattaatatatagtcatgatttcttggattttatatttaacttcagattgttaacttttttctaattataaaggtatatgtgtgtgaaagaaagcatcttgtataggatgtgacaacaagaatacactgtgaagtactcagaaaagccaagtgactaagctaatctatgtagcatgggacttcatagagttctagacgatagcctcacactttctagcactaattataaacaagcactgtcaaatatttatttccaaatattatgcacagggagcacaatgtgaactgcaaggtatttgaattacctatgaacaaatgcctcagctacacacatcccacaacttaccatgcatcattgataaaaagcatgttgtgttgggactttttgtattcatctgtgacttatttatttatttcactacacaatatacatgtaataattagaagtaaatatagacagagatcagtctccttagcataacagttgaatgatgggtaaatgctcaaagcttttattgagaccatccaggttgatgggagatatgctgaaaaaaattagcaaggaattacatgtccccaaatcacagcttcctttgcataatctggtttgacttgtccgttaagggcaaagcacatttgagaaggggaaccatgctctgtgtttaatgtcactccttccctccacttctctcatatgttcttctgcatctccgttctgcttcatgctttccattattgtatgtaactcagtcacaaattcaaggggattctctatgaactgtagtgcatctttgggaacattggatttaggataggtaaaggaagaggtctctgggtcactataggagttcatccaattggttattttatctgaaaatattagagaaagacattgtaggcttctggagtctgctgtggaaggactgcttaagaaagcctctgtcacagagaaaaatgaaccactgactctcaaaaggaggatttatttcttaattcaccaggtcttcaactaaaagccatctcatttgtcctggctccttgaagataattcttcagtgaaggtcagttgcttggtcctgttcccttaggaagaaaaaggttactttgccaggaagattcattatctgggaaatggagagagagagagacagagagagagggagagagagagagagagagagagagagagagagagagagagagagagagagagagagagagagagagatgtgttcaccatataggctcctgggatgtgacaagggtatatttcatatttacttttatttttctcatagtcatcctatttttaaaactcccagaatcctagatgaatgatggctagaattgtctcatggttattggacattatcttaattgggaattcctagccctccccttactgatttctcctcaagctctatgattttcattcttctctacttcatttcaatgtactctacctttgctgtcttctgactcctgtcttgccttctgctaacattttaagaaaaaaaaattaacaaacaaattttgtctctgattcagtctttcttaaagccattctgaatcccactcatactgctgcatgtctgtacagaaacatactttcgtttacatcccctaagtcatccaaagaacatgcaatcaagtcctgagaaagcccttcttaaagacagtttcatatgggagacagaaagcagagttctgatctgatctggttctgatggtttgtgacaggtattgtgtagctttcattcaatggtcattgctcctgtctttttcatcagctgtgaaatccaacttaaactctgcttatgatgtctctctttgggttttgctatctactcgaggttcagagttagagttcacatattttgaaatttaatgttctatttttgtatatggacacatactttcttcctttcctccagtgaactattatataggtgctttgctgtcttttttttttcaggctcttacactgtatattaaattatccattacaaaaagaagtggagctgaaagatttgtagtgcaatcaaaacagagcttattcttaatgtgtcaatattcatttccactttctcataaatctcctacttctcttacaaaatctatttttcttacctggatattttaaagaaaaaatgctattaaatcaagtacctaaatcttacctaaactgatttgtaatggaatcatttagttccagacaagcatcaaacacggcatattatctgagaggtagcaaggcatccatctcctttatagattgaagccttcacttcttccagggctcatcccattctattgaacggactgtatgtagcagttaggagggctgtgagaagagtctaagggatatttgggttattttttttctaagacatgtctctctcacaaagctatatgctttataatgtgtctttcttctgtttttaatgacttgtgcacacatacacacaaatactaatgtgtagagtcaggtagagagtactgtagtatgtatgttattgacacctcctttccatgattggtggttagtagagtctccagaacaacaggtagccttgtttctttatctgtcataaaactcagggtgatattttatgaatacttgacaaatacttttttacttagaattgagtctagagccagtaatcatttcctagaggtgatcctctaggaaagtatgccacagagtgggtagtaaacacatcatagcatttatcaactttttcttcttctctatcctactttctggaacaataaacctacatatattttctttatctttgttagtattttaaaatactcaaaatataagtaactattacatgcaatataagaagaattgttagaatgtttttctttaacatcttatgtctttttaaatgaagtaaaattatttcaatttataacactctttctgctttccagcccttcctaacttcactctctctatacttctatgcttgtccccaccaacctgctgacactttctctgtcgacattacatgcatacatgtatacatttttatgcatgaacataaatactgcctgctgagtttctttttattttgtttttttttgttactatttttattgtattattcgtttcttattgttcttgctgctgctgctgctgctgctgctggtggtggtggtggtgtgtgtgtgtattcagggctgatctgatcattcttcaatgaacaatcagtaaggtaattgatactgtgaaaggaaattttcccaggattactaattcgttgtctggaattctttttctaaccatgtgaccttgtgaaattttcctcctttgcattaacatatctgtcgatactgccaatattctggtcttgcttattcagctattttcatgagagactaattcagaacagacttccttgtattctggttcttacaacatttctttctctttttccatggaattccctgatccacagatgtaggagctgtgatgtagttgaaatttgaggctggaatttcctatgatctattgatctctgcattttgtgtactcttggttttcatttgctctaaagagaagcttccttgatgagggtaggaaacaccaattatctatgggccaaggaatgagttttagaatgtaatgagaaattatgctgttctagtaaactatcagtaagagatttttttttttttttaggttcatgacaccactaaaccaggaaacctgactaaacatctagtagcaggcatgattttcctcctgttgagtgagccttaaattaaactagagagtgctacttcttgtaacgttgtatgtattttgctactctagacattattatagttcatagtctttctgactttggtaaaacaaaatctcaatatgattttacttgtattttattaatttctaaagatgatgaacatttttgaggtatttcttagttgattatctttttaatttttattgataaccctctgtttaaatcccaagcctatccctttaacaaaatttaatgtgctcttaagataaaaaagacctagaaagactaaaagtagagggactacacatcaatgtaataaggcctatagatgagaaacttattggcaatattctcatacgtggaaaaaaatttgaatcatcacattaaatgaaggcagggatacctactactctccttttcagtacagtactaaaagctttagctcaagcaaaatccacaagaaagaaattaaatctgtacaaataggaaaaggagttaaattatctgtacttgcatttgtataaaatacataagtaaatgatcttaaaaatttccccagaatcttctagaaacaacactttcatcaaattggtaaagatgcaaaattaacttataaaactcaatagcctgtattttcatcaacagcaaacacactaaggaagagttcatgagcattctcccacttacaattgcctcaaaatcaatatagtatcttataataaacctaagcaaggatggagaagatctctactaaaatgaaggcttaagatttcccaagtagaatattaaaaaatacaatgaaaagtagaaagatatcccatgttcatagatcagtaaaatttaatattgtagaacatcaccatgttaccaaaagcaagttacagatataattacccctgcccccccaacaatctcagagcatgttttgcagaaattaaaaacaaattaaaatttttgtggaaacaaaaaaacgtcctggaaaactaaagcaatcttcagcaaaagaatatctgaaggatggctgttacatacttcaaagtatattatagcacattaatagtagaataatatgatactcgtagaatacaggtagaaaatacacggatgcagaaataaatacaactaactacaataatctaataggggggaagacactggaggaaagagattaccttcaaaaattatagtgagaaaattggatgtctacatgcagaagagtgaaaatagttctatatctatcacattgctctgaaattagattcaagggaattaaaaatcccacaaaatttctaagataaagtataagcagtaccctataaaattcaagtgtagagaaggactttgtgaacatttaccaaggaattaatgccaacaattgaaaatggaactcatcaaattaaaaccatctttggttcagctaaataaacaatcaagtgaagaagtaacccatagaacagggttttcttgtcttttaaaacatcaattcaatgaataaagctacataccaatatttaattttaaagaaaatgagagaatttttaaacaaaatttatagaaaaaatcccaatgatagcgtccttcctttgcacttatattctactgtatactattttctcatgctgctgtttatattcaatctaccttgtaaaagacaccttgatcaccttccaaactggaaactataaataaaactactaccaatattcacaaagatgtttgaatttagcattgaattatactcctctgagtaaatttttattgactccttattttagtatttttaaggtacaataggaagtaataaattttaactccaaacacagagttcaaacattagtttcttttcacatcactcatggtcctaaaattctgcatttgtatcagttctataaccttttttcagactatattggtggagaaaatagtgataaaatatataaagtgtttaaagctgtgactaacaaaaaacttatgctctattatagggatcactatatagtatgaatgtttctatatgaatttgtactataaatgaggctggtattgctaacctggtattcttccagaacaaacaaaaaatgatatctctacatccttgctcaataactagttatgatttgttagcatgaggcagttgaacttaatatgaataatcaaagaccatatccagatactatgaagagtattatttctatgttgaatgagggtgttcagcaattgctttgggccacttgcaaacatacacttgtttaatagaggggaatgctatcatcatgaacttaggtcaaactgggatccctgtctccatattcatgtagaaactgctacaggttacttatcacagaaaatttaatctaagttataagctgtataataacatttatatactaaaggaggaggtggattaattaacaaaattaatagcaaataccaagtaagagctaaataagtatttgccattttctattaatcgctggatattcatgaagtggtgtaaataacttttaatccattgatcactgacttctcagattcccagcttgtgtagatcttagctttagagaggcaagcttaggatacactgcataactcatgagctggggatcaacagttcagaagtgtatttcgaattcagttaattcagtttaacactcacgatttagctgaacttcttgttttatttaaggagacatgtttgatgcttctgtaactgtcttgtacagctaaacactgacagaagcgtgatgtctaaattaatgccagccatactaatcaaaggttatttgctttactgtttaaacagagattattcatggcaggagctgatgtgttttgatttttcaacgtgtcagctataagatcagagcagatattttagccttgtgatgattccctataaatagaggcataaaaatcttaaatgctcattgatgtagttataaatcttcatttgggatacgttgatccaggcaaaatgaccctgagctaacattactctagaggtaacttctatttccaaactggtgaattttaattatgaacctgaaattcttggttttgagatgatcttatgtttctcctggtaatttactgggagaattttttttttaaagttagctaataattgttgctctcaataccctcttgtaagccagcttcttctactaaagttctgcttgagatcaaggaagtaagcagcaataaggccataatgaaaggcagaagggtagcaaaatgtaacaacttctattagaaggcccttcattcttgtcacttattaacaatgtactgagcctagagtaagattttgctcctcatgaattaaaacctcatttctgccgctcacaaaatgaaagctaacaaaaagttattgtcttgaaaattaataatttaagtctattttctagatatgtaaaatgagaatcacagtgatacacatattttggatgcttatctgatacaatgtttatgcttccagtacttggaaaaggaccctttgcttcccaggctattatcttattataactggatgacaaactagccatgggagaatgattaaatgtagggctgagtataaagataaagatgtcctgtcttttctcaagggggcagatgcttttctttttccttttctttctttctttctttctttctttctttctttctttctttctttctttctttctttctttctttctttctttctttctttcttttacagtgtgatgaaagatcatactatcactttgtttttggatagtttctgtacttctttcaaatgtaatgtacttactgcgggatttaaaaataatcctttaaaaagttctcctccatcaagtctctgatacattaggcttatcttctctcactgaggcttgaaaagactgccatagagactcagctggatctctagtacatatgtgctgggggtcattttccagactgtttatgttcttttggtggctcagtctctgagagctccccgggttctatgttggtcttcatgtgagatccccatgcccttcggggactttaaacctcccttcagctcttccataagagtttctaacctctgtccactgtttggttgtgggtctctgtatctgtctgagtcagctgctgagtggatcatctcggaggatagtttagttaggctcctgtctgcaattaacctgctctgtgggaaggagaatggggcagggggataaaggggacatcctctcagaggagaaaagaagggaggatgtggggagggacttttggagggggaggagcagttggatgcaatttaatacacatatgcgtacttaaaataaatatatgagtaatctactgaatcaacgttcaaattcacttaacatgatttaagtggattcaaatctcttataaatagcaagaaaatatctattaaaactatagaaaactaatgtacatagttttttatttacattggtaactggctgaaacaaatagtagtttacagtataaataacacattattgcagcctgtttatacacatgtaatgcatccctggcatttcataattagatactagacattcttagcactgtgaaataatcctgttcataaatataacctctaccaaaactttcaaattttggaaaaatattttctaattcaaaatttaattttcaaaattttcttaaatttagtttccatattgaaaacaagccatcatttacaaaaagattcaaatatgtttaaatagtatatataaacaaaaatgaacaatttctgatcccatttaaccccagactcttgcagttagcggtaacagaggcccgttggacatgcatactttacatctttacatgccccagtacaggggaacgccagggccaaaaagtgggagggggnnnnnnnnnnnnnnnnnnnnagcaaagctcagggagagaatgagaaatttgaaaggaataaagggtagaaataacaggactgctaagcattgcttattcatcttactttttttttttttagcctcatagtacattgcaatctagcaaactactagaacacagagaagtagttaacttgagtagccaaccccactagatagtttgctagccttctttttaataaccgctattatcctgaaaggtaggtgttttttgcctgcatgttatagataacacacaaaactttgggaatcattagtgaaataatcccaagaccaaataagaaactaagagacagtaaacttggaaattgactccaagttgacatatttcttgtcttgtccccagtgaaggcactagagacacacacagagagactcatggctctagctgcatatttagctggtgatggactagtcagtcatcaataggaggaaatgcccttggtcctgtgaaggttctatgccccagtataggggaatgcctggaccaggaagcaggagtgggtgggttgaggagcagggggagggggatagaaaaggggatttttagagaagaaactaggaaaggaggtaacatttgaaatgtaaataaagaaaatatttaattaaaagaataaaaataaagaaaaataagataaatctgccttattttaagtaccttcaaaaactaggtggttttaagattttggtaaatacatgatctaaatgctaagaaatatctctacatgtttatatactacctgtagcatttataaaagttactcttgtagtaattattatggatattatgatatatgtagaataaactgggttaggtacatggaaataaaagctttttctatacaactctaatacactaagcttcccctactttagtgagcatttgtttattaatgcaaaattccatgaagtgggttaatttttcactaatgagaagaatgaatcagtgaactcttagatttccttctgtatgagcgaacaagcttctcacatcatatccaannnnnnnnnnnnnnnnnnnnaggaggagaggtgaagggaaacagtattcttttttggtacccaaagacatcaaaattgtacaaaggatgtaaaacaaattaacatgactaaagtagaaacgctattacagaatacttggttctttaaaatatggacttagaccgaaatagacactgtgcagtactttgcctttcaaacattcaaaaaaaattatcaattcctaataagttcatgcaaaggtaacagcagacaaagaggatttgatggtacaactaagagactcttattgattcagcaggcacactaaattaattgggcctatttgtaaaattctgaaggatcaatctagggtgactcccagatagactggttaacagattgctattaataagctcataaaatgcaagcagcagaatatggtacctcaatagcggttgatgtcttttgaacatataatggtattgtctctctcaaccataaaactgccagcagttgatgaggtttcccactgattcctttctcctacaacgtgttcagttgggagtttgtatggtttgggaatatttaccaaaaagaatgccataaaggttttcatcatcccaagcattactaaaatgcccagccctttagcccagacaataaaaacttctgcagctggcattatcaatctattgcacatttgtagtatgcataggaatgctgtgaactcagtaaagccagatttcaatttcttatccaaaggaaatgtcacattatgaaaagacctaaaaacttaccaatgggtccagatccaaagtgcctaaagatacgtgttgcttcaacttcttccctgcctctcaaaagactcgaggtgtctaattgagaaaacagtttcgcttttcagatgaaggttaaagaagtcagccacactcggatgaaagcagatcgcttgtaggctgcctttctcgatgcatattttactatatatataaaatctgatgaagggttgaggaggtttattggggataaaatacctttatgatatgccatatttcttccttgagtcaatcatgctataatgagcacgaagcacagtaggtaaaatgaaatggaatgtttgaggccaaagaaaatctccgtggaaattagcttggcctccaaagagcctttaaaaaacaaaatgctgccagcagcaaggcagtttgactgcagatttgaaggtcagcattcgaaaggacaacacatgcaaatattacagaaatcactacaaagttactaacttacagggagaaaaatgcatcgattcaactcagtccactgtgccaattgccagtagaaatcactaatttgtttgcccattgtgttactgacatatgtgaactatggctttttaatccaaataccatcttaagtctgaagaaactgtcaatttcacagaaatagctgaccctgggtttgattctgtgtctagagcaattaccacaacttgaccccctgttaccataaatgggagagagatataaacagaaaacaacgtaaggagaaaagaacgagccatttactcactcttattatttgctcttgaagtgctagctggctgtcttataaacacaatttgaaaagggcacagggctggatccatacctcatcaactgtttcaagattttggttgagaaatcccccaaaaagtaaagaatgtcactggaaattagtgagcatcttagtatcataaaagtggaataactaattggaagtcatgaaccattcgagtctggaccatattgcttacttttctttttaagtagcattcagaggttttatcccatatgcactctatatcaatatataaaaatagatctaaaaaataaaaatgaaacaaaattaatggaaaggatatgcagtaaagtgacccattttatatgcttttattcctgcaatttcccattttatcttataactacattcagcactatattttgaaagaaataaatattgccaaatactaacctcagcatctctttggtactgataaaatgtgagtgttggttgcacactgaatcaaaccattgggtcaatagacaccgatatatatgacataataaagtagagtgcttaattagccccagtggaacttaagggctttgaaatgattaacctaaggaagcatcgtacattaaaattatggatgtgttcttcccaattaaagaaagtctgaaaagccccatctggcaggagacattttgttattattaccacatatttgtttattgcacttatatagaatttttactccaaaaagcttagagtgttgtactgagtgtttggcacatctgagatcataaaaataaaagtgagcaaagctcagggagagaatgagaaatttgaaaggaataaagggtagaaatagcaggactgctacgcattgcttattcatcttacttttttttttagtctcatagtacattgcaatctagcaaactactagaacacagagaagtagttaacttgagtagccagccccactagatagtttgctagccttctttttaataaccgctattatcctgaaaggtaggtgttttttgcctgcatgttatagataacacacaaaactttgggaatcattagtgaaataatccaagaccaaataagaaactaagagacagtaaacttggaaattgactccaagttgacatatttcttgtcttgtccccagtgaaggcactagagaaagtacccaaggagctgaaggtgtttgcagccccctaggaggaacaacaatatcaactaaccagtaaccgcaaagctccctagactaaaccaccaatcaaagaaaacacacagagagactcatggctctagctgcatatttagctggtgatggactagtcagtcatcaataggaggaaatgcccttggtcctgtgaaggttctatgccccagtataggggaatgcctggaccaggaagcaggagtgggtgggttgaggagcagggggagggggatagaataggggatttttagagaagaaactaggaaaggaggtaacatttgaaatgtaaataaagaaaatatttaattaaaagaataaaaataaagaaaaataagataaatctgccttattttaagtaccttcaaaaactaggtggttttaagattttggtaaatacatgatctaaatgctaagaaatatctctacatgtttatatactacctgtagcatttataaatttactcttgtagtaattattatggatattatgatatatgtagaataaactgggttaggtacgtggaaataaaagctttttctatacaactctaatacannnnnnnnnnnnnnnnnnnntttgaaatgtaaataaagaaaatatttaattaaaagaataaaaataaagaaaaataagataaatctgccttattttaagtaccttccaaaaactaggtggttttaagattttggtaaatacatgatctaaatgctaagaaatatctctacatgtttatatactacctgtagcatttataaaagttactcttgtagtaattattatggatattatgatatatgtagaataaactgggttaggtacatggaaataaaagctttttctatacaactctaatacactaagcttcccctactttagtgagcatttgtttattaatgcaaaattccatgaagtgggttaatttttcactaatgagaagaatgaatcagtgaactcttagatttccttctgtatgagcgaacaagcttctcacatcatatccaagtggctgaggtgcaaatctattgtccacaggagcgtacattagtcacctgtcacagtgaagtccacctgttgaagttaattcccggttcttcctcccagccccatcctttcagaaataagattcagattcaaaatatatttacacataccttcttcatatagctaagatttactctgactggatcatatctaaaataatccaattattttatcatacatttttccagttggctggttacttatgcccaggtaccatgtgtctgccttatcacatctttatggtggacctggctctatcccagaaacctttctcctcccacatatcccaccttcatttcctgactaacccaaagcccaggctttttaattgacagatgattcatctattaataagtatcatgttctctgtatgtctacctctacttctgaagacaacttgaagtgtcttgctaaatatttctactgttatacttgtgaaatatgagttaatcaaatgcatttttaatggtggggtcaatatttggaatatatgtccagtgatcaaaatgattgtactgaatttgggaacttttcattattggcttgcttttgcctgagaatttatagaatgtatttaaaagtgtcccatagaaatgcagtagggtataaattatccatagagttatatcatttcaaaaatacaataaatatgcacaagtggatcccattttttaagaaccccttgtaatggtaaaaaggaaataatgaccaaaaatatcctaagttcaatatccatagataggaaatgtcaacctgaacgacaagaatcaagaattaagaagtttgttacttcaaagggtttaaaagattgattctataagactctaagtatacttgcaagatgattctcttatagcttaatatagttacaacaatttaaattcttaatgtagcaagcgtgagtttcaatcctagctttgctattgcaggcatataattttcaaaaattagtaatctaaattattttatttacctatccaatagggttaataatagtatgataaaattgaaaaagaacacatacacaagaattagtacaattttcagtacttaccaaggatattactataattattgataatattcttagaaacagtattatttctgtgttgtttgatttttaccacctcttttactcaacttttgtctaaaattttctgctctttagctataatccctgcagtatcaccccactacgaaccaaaatcatctctatgtaatttacttaaatacatcattattaaaattttaaaaaccttcaataaactgatttattaggtaagatatgttaacaaaagcacaggttttgaaaagaaaagaaatagttgggacaacacatttacaagaaaaagaaaacaaagaataaaaacaacaagaaaatcaaacaactgaaaagtacctggaaagaaggctcagttgttaagagcactttctctccttacagaggcccctgggttcatttaccatcacccacaggactgattataatgttatataacatcagggcattcaatacattcttctggcctctgtggaatgaggcaggcaaacagcgtacttacataaatgaaggcaaaactattggaatattaaaaaattaaaagtattaaaaaatattttagttaaaaaataatatgctatgtacagaatgaggtaaatatctagaaattatatatgttgatatggttgatatccaaaataagtaaggatatcattaaactcaagtgcaaaattacacatatagcattacacatatatctatatcatctatatcatatcatctatatcatatcatctatatcatctataccatctatatcatctatatcatttatatctatatccatatccatatcaatatccctatctatctatatatatatatatatatatatatatatatatatatatatatatatattacatgcatatatgtatacacacacatataccatatatacatacacatatatgagcctcatcataattagttaacagaaaatggaaattaaaacataccttgcacttgacaataatcatttttttataaaaatgagtcttacaaggttatggagaaatataagcatgtatgtacttggtagaaatataaaccaggaaagtttatacaaaactttatgcaggttcctcaaaaattaaaaaataatagctggagatagcactccaaagttaatagtatgtgtgaggccctggttcaatctctgtatgacaataaaaataaataaaaattacaaataatatgagctctggtaaaatcacttctgagtactatttcttttatatatttttattcactttctaccaagatcacagtgctgcctcccttctcttcttccagtcccactcttccaacccctgccccattgccccacccattcttctcagaagaggggaacctccccttggctaccaccccatctagatatctagtcccagcagaactatgtgcatcttcttcatctgaggcccaaccaagcagtccaggtaggaggaggggatgcaatggcaagggtcagagactgagacagccctcactctacttgttctaaatgaagagcaagctgcacatttgctacaagtgtgtagggggtctagatccagttcctgcatgcttcttggatggtggtccagattctctgagcttccatgagtccaggttagttgactctgtaggtctccttttgttgtccttgatttgtttggcttgtttacttttgtctgcctcttttctccaagactccacaaagtccacctgtctttgcctctgggtctctacatctgcctacatctgctgctgcatgaaacctctcaggagacagttatgttaggttcctgtctgcaagcatagcagagtaacattaatagtgtcagaggttgtctctcccacatggaatgaatctcaagtttgaggagtcaatggttggccatttcctcagtctctgctccatttttaaccctgcatgtgttagataggcaagaaaatttggggtcaaaggttgtatggatggaatgatgccccctctctccaccagaagtcatgcctggccacagggctctctatatctccctctagtagagacgtgagaatattaacctgagtgagttagcccagagagagaaagagacttatggcatgtacttacttctaagtaaacattaatggtaaagttcaggataaccatgctaaaattcactgacctaaagaaactgggtgataacaaggttccaagggaagatacatgaatcttcctcttgagtgaaaactaaataatcatcagaggtgggtgggaaaatgtcactgagtgggagaagggatggtgatcaggtatgcggaatatatagacaggagagggagaggtgtgaaaatggaaatctgtggtgccatctttagtgactagctagaagcctgggacaggaaatgataagtggagtctatggggtgaccgctgccacttctgagttcttattcaaagaaatttaaatcgcagtctcaaaataaaaatgtatgcattgcaacataatagttgtgaggtggaatcaagctaattgtctgattgaatagaatttaggaaatttgtgtgggtacatggctcatttagtatagttttggcaatacaaatatggaaaccatagtattagcatttcctctaggctttacccaatagttgaaacagccagataagtgcattgctcacttataaaaatactgttctctctctctctctctctctctctctctctctctctctctctctctctctctctctctctctnnnnnnnnnnnnnnnnnnnntagggacagacccttatccaaaacaaaaaccaaaaaccaaaaagacattctcccagttttgcaaagtaaactgtagcgttctcagtacatatccagtgtcactggttaaaagttatagataaattattttcaaatttaaaatgttgctaaggggatgaattttatcatataataattattatagttcaaatcataagtaaagaatgattgaggaaatttgaagatagtagatacatataacagtgatggtttcaaatacgtacaacatttcttttttaaacttaaaaaagagtatttagtttgtaacataccttgtttcatttttacactgataactagcacagttaagtcacagaaatgaaacattttccttatggatacaaaggtattgatgcagctatatatgatggaaaactgactagaaaaaaatatttattcctactcttttctctgacacacagctttaatttctactttatattgtttctttagaaatgtctcacttccctgacctccattttttatgtatgtgggcatacttgaaaatatttcaagtcatagtcatatgactccattgcttgtgggcaattgaaaatgcaggagcattttggaagaaagctgaaagtgactgaagtgactgatgacagccagaaagcccaaaaactagatgagaaagtagacaagaagggataaccataaaaggcacagccctctgacccgtatatcctgctccaccctgcctattttgcctatacagctaagagttcatcaatggatgtactcagcagttctcaactaatgagtcatgattcctttacagatctaacgactttcacaggggttacatatcgaatatattatgtatcatatatttacatcatgatgcataacagtaataaatttacagttcaaaagtagcaaggtaataactttatggatgtcagtccccttacatgaggagctgtattgaagaactgcagcactaagatagttgagaaccactggattaactcatctaataactctcaatagcatcactgtctgaaaagaagaacgtcaacacacaaatcttctgaggaagtttcagttatataatactgggctccaggaaattatattttcagtgagtcctcaggtgaggctaacactgctgaatctgatatactatttaaggactgcttgtgtatcaatacacagaaacacacacacacacacacacacacacacacacacacacacacacacacagagagagagagagagagagagagagagagagagagagagttcaccctgaactctttatcttagaaaatgttggtttagttagaaaaagagtgaagttataagaaaatccttcagaagccaggtgtggtggcgcatgcttttaatcccagcattcgggaggcagaggcaggtggatttctgagttcgaggccagcctggtctacaaagtgagttccaggacagccagggctacacagagaaaccctgtctcgaaagaaaaaaaaaaaaaaggaagaaaaaagaaaaaaaaaaagaaaatccttcagatatttcttcacttttggttttctgaacaagttcacaattgaggatagggagcagaaaaagagactctcatcttacatctaaaaacaacttcagatacgacttgtctgttcatgtccttcaggtgtcctgactcatttatttaaaagataaaatgaagactttattggtctatggttgaatgccaaaggcccagggctcgagactcagcatctcacaaataagaatgagaaacatagtataaatctagttccatggagaatattttggtaagagttggtgtcaacacataaaacatatgccccagtacaggggaatgccaggtccaggaagcaggagtgggtgggttgggaacagggtggggggagggtatacggcgccttggggataacatttgaaatgtaaatgaagaaaatatataataaaaattgaaaaaatcccatgagaatgttatagaaacatgaccgtaaaaagtagttccatgttattattaattaaataattagtatttcttaaaaagtaattttatcttctgaagtatagtgaggctgataggccttgtttaaaaggataaaataaatagttgagtagatatagtgcctgtagcaattatccttctcaaactttttgtgagattttcccacagctttaattaatacctacctcaacatacatttaaatctggatttaaaaaaattgcctgtatacaaatggttttaatttttaattatatttactcatttcttgggaagggtacatgtcacagcgagaatgtggaggtcagaaaaccacttgtaggagtcacatggcttactctatcatgggtcctacatatcaaactcatttggccaggcttgtcaacaagtgcctttatcataggagccatcatattattcatgtccagatggcttttaagggagatgctgttgctattaatttcactttaatattactttatgacacactatctatcttgatattaagttgaattttaaataccagtctgttacaacttaataaatgaatggatattgtacctgtcaaatacctattggtaaagaattagtatgtatacatttgcaattatgtaatttatttctaactcatatgtatgggtacacatatacatatgtaaatatgagcattaaataaatttgctttgaattccactatgcaagtgtgacagggaatcaatagaatataggcatgctttatgtgtctttctgaattctttctcaatgaagaccacaaaatcagaatgcataattccatctttgaagaggcatctttgaatttgtaagtcaaatctgacatttagggataagctgccagtacagtgtttgttcaagtcaagtgatgattcagtgtctactatagtagtaatagatatagtagttgtagtttaattaattaaggtcataataattttgataaggcatgtaaacatttataatttcaatggatactcataaaatttatcataatcatcattcttgccaaagaaattaaatattccaggtaattaaatacaataagttaatccagtagttatagaaaacaatctacatttgtcacacagtttacttagtttgcattagttcatttagaaatatatggtttcattacagaatgttttttagcttttctatgccccagtatagaggaatgccaggaccagtaacgggagtgggtagactggggagaagggggagggggaggggaaactaggaaagggtataacatttgaaatgtaaataaagaaaatatctaagaaaacacagactaaaaaatgttttaatcactttttacagttcagtcatttatctcctcccagtccacactcgggctgtttcttttcccaaactttgtccctcctcatctccaagaggatgtcccctttccaccacccccacctcaccagatctccccaccccctgggtcacaagtctcttgagggttaggagcatcttctctcattgaggccataccaggcagtcctctgctgcatatgtgtcaggggcctctcatcagctggtgtatgctgcctggttggtggctcagtgtgagagcaatctcaggggtccaggctaattgagactgctgatcttcccatggagcccccttttccttcaagttcttccagcttttctctaattctaccacaagggtgtcggcttctgtttactggttgggtgtaagtatctgcatctgactttttcagccccttgttgggcctcttggcaggcagtcatgctaggctactgtctgtaagcatgccatagcaacaataatgtcaggacttggagtctcttcttgagctggatcctaatttgggcctgtcgctggactttcttttcttcagtctcttcttttctgttcctgcagttcttttagacagaaacaattctgggtcagagtttttgactgtgggaaggcaaccccatccttccacttgatgcactgtctttctcttggaggtgaactctacaaattccctctccccactgtagggcctttcctctaaggtccatttctttaagtcatgagattctttcacctcccaggtctctggtacattctagatagtatgcccctgtctacatcccgaggttgcctgtttccattctttctgtgggccctcggggcttcagtcctgccccactcccccaggtccctatctcccactgaccgcatgattgctttcttctccctcccaagtaggattgaggcatccacacttggcccctttggcttgttaaccttcttgataactccaatgtctcaggctctaagataaagaattgataaatgggaccacatgaaactgaaaagcttctgtacaggaaaggacataatcaataggacactttggcaacatacaaattgagagaaaaaaaaactacactaacctcacatctgatagaggggcaatatccaaaatatataaagaactcaagaagctaagcaacaaaaatcaacccaatcaaaaaaaggggtggggtgggggtatagacctaaacagagaattcacaacagaggaattttgaaggactgagaagcacttaaagaaatgttcaaaatccttactgatctgaaaatgaaaatcaaaacaaccatgggattccactttacaccaattagaatagctaaaataaaaatctcaggtgacagcgcatgttggtgaagatgtggagaaagagaaatactcctctactgctgttgggattgcaaactagtacaaccactatgaaaatcaatctagagggtcctcagaaatttggaaatagatctacctgatgacccagctataccaatcttgggcatatacccagaagacacccctccatgccacaggggcatatgttccactttgttcatagcagccttaattgtgatagccaggagctggaaacaacccagatgcaccacaacagaagaatggatacagaaaatgtggtacatctacacaattcaatactgctcagctattaagaataagagcatcatgagttttccagacaaattgatggaactagaaaatatcttcttgagtgaggtaactcagacccaaaatgacatgcatggtatgtactcagtaatcagtggatattagcaaaaacgtacagaatatccagaactcaagaaggatattttaaaataaatctgatatcctatgaagtgaatttagatgtgatgttcaataatcttacaggtcctgatttagcctaactctagtcactgcactttcagagtgctttgtgtcttacaaactcttaagaattgcatcagaatttcataattattcaccatacagaattcacaacccctgtagtagatacatattacattaaataattatttatttttagataagtactcaattcattatgatcatcttgaactatatctagcccatacacagtaatgctaaatgtattgtataaataataacaactaaaatttccccacactttgataagctcctgaaatggtcatattactcctggatgacagcaattctgcccaagaatgaaatcctcctttattatctgttcttttttaaagatttctgattgttttgtaatgctttgttttctcaataaactttcagaagattatgccagattttctaataaaaggaaaaacaataagagcaaaaaggaaggaggaaaggaaggataagggaaagaactctaatctgtaggagatcctgttatataaaatgacagaaaggaagattgaagtgacaaagatataagttaagaatttgaaaatggagtccaaattgtccacctcctgtagctaggaaaggcttccaatagaggtttggggacaccaaccaacccacaaaacattctatttannnnnnnnnnnnnnnnnnnnttctttctctctctcccgctctctctttctccgacccacacatgtttctgactggcctcttcccttctttctctctcctttctccttacggtctttctctgtcccttcttactctactcccttccccaaagcccctttcccatgtcacaaataaactttattttatactagaccagttttatggtcttatggctgaaacctcaggcaagggatgtcttagcatgggtctgctaaggaactacctcctgccacgtcatgctgccacattacaaaacatatcagtatggaaccccaaacccacaagaaagtctgggcatggcaactcatatctgtattcccagcactgggaagtgaatacaggatatactccctggagcacaaagctcagggtgtctagtcagtctgtgagcaccaagtttagggacagaccttatcaaaacaaaaacaaaaacaaaaacagaaacaaaaacaaaaagacatctccagttttgcaaagtaaactatagattctcagtacatgtcagtgtcactggttaaaagttatagataaattattttcaaattaaaatgttgctaaggggatggattttatcatataataattattatagttcaaatcataagtaaagaatgattgaggaaatttgaagatagtagatacatacaacagtgatggtttcaaatacatacagcatttcttttttaaacttaaaaaagagtatttagtttgtaacataccttgtttcatttttacattgataactagcacagttaagtcacagaaatgaaacattttgcttatggatacaaaggtattgatgacagctatatatggaaaactgactagaaaaaatatttattcctactcctttctctgacacacagctttaatttctactttatattgtttctttagaaatgtctcacttccctgacctccatattttatgtatgtggacatatttgaaaatatttcatgtcatagtcatatgactccattgcttgtgggcaattgaaaatgcaggagcattttggaagaaagctgaaagtgactgaagtgactggtgacagccagaaagcccaaaaactacatgagaaaatagacaaaaagggataaccataaaaggcacagccctctgacccttatatcctgctccaccctgcctaatttgcctatacagctaagagttcatcaatggatgtactcagcagttctcaactaatgagtcatgatcccttgccagatctaacgactttcacaggggttacatatcgaatatattatgtatcatatatttacatgatgatgcataacagtaataaatttacagttaaaaagtagcaaggtagtaactttatggatgtcagtccccttacatgaggaactgtattgaagaactgcagcactaagatagttgagaaccactggattaactcatctaataactctcaatagcatcactgtctgaaaagaagaacttcaacacacaaatcttctgaggaagtttcagttatataatactgggctccaggaatttatattttcagtgagtcctcaggtgaggctaacactgctgaatctgatatactatttaaggactgcttgtgtatcaatacacacaaacacacacacacacacacacacacagagagagagagagagagagagagagagagagagagagagagagagagagagagagagagagacttcaccctgaactctttatcttagaaaatgttggtttagttagaagaagagtgaagttataagaaaatccttcagatatttcttcacttttggttttctgaacaagttcacaattgaggatagggagcagaaaaggagactctcatcttactaaaaacaacttcagatacgacttgtgtgttcatgctcttaggtgtccgactcatttatttaaaagataaaatgaagactttattggtctatggttgaatgccaaaggcccagggctcgagactcggcatctcacaaataagaatgagaaacatagtataaatctagttccatggagaatattttggtaagagttggtgtcaacaaataaaacatatgcccaagtacaggggaatgccaggtccaggaagcaggagtggccgggttgggaacagggtggggggagggtatacggggctttggggataacatttgaaatgtaaatgaagaaaatatataataaaattgaaaaaaaatcccatgagaatgttatagaaacatgaccgtaaaaagtagttccatgttattattaattaaataattagtatttcttaaaaagtaattttatcttctaaagtatagtgaggctgataggccttgtttaaaaggataaaataaatagttgagtagatatagtgcctgtagcaattatccttctcaaactttttgtgagattttcccacagctttaattaatacctacctcaacatatatttaaatctgaattttaaaaaaattgcctctgtacaaacggttttaatttttaattatatttactcatttcttgggaagggtacatgtcacagcgagaatgtggaggtcagaaaaccacttgtaggagtcacatggcttactctatcatgggtcctacatatcaaactcaaatggccaggcttgtcaacaagtgcctttatcataggagccatcatattactcatgtccagatggcttttaagggatatgctgttggtattaatttcactttaatattactttatgacacactatctatcttgatatcaagttgaattttaaataccagtctgttacaacttaataaatgaatggatattgtacctgtcaaatacctattggtaaagaattatgatgtatacatttgcaattatgtaatttatttctaactcatatgtatgggtacacatatacatatgtaaatatgagcattaaataaatttgctttgaattccactatgcaagtgtgacagggaatcaatagaacataggcatgctttatgtgtctttctgaattctttctcaatgaagaccacaaaatcagaatgcataattccatctttgaggaggcatctttgaatttgtaagtcaaatctgacatttagggataagctgccagtacagtgtttgttcaagtcaagtgatgattcagtgtctactatagaagtaatagatatagtagttgtagtttaattaaggtcataataattttgataaggcatgtaaacctttataatttctatggatactcataaaatttatcataatcatcttcttgccaaagaaattaaaaattccaggtaattaaatacaataatttaatccagtagttatagaaaacaatctacatttgtcacacagtttacttagtttgcattagttcatttagaaatatatggtttcattacagaatgttttttagcttttctatgccccagtatagaggaatgccagtaccagtaatgggagtgggtagattgaggatcgggggggtggggggggaagactaggaaagggtataacatttgaaatgtaaataaagaaaatatctaaggaaaaaaaaagaaaaaaagactaaaaaatgttttaatcactttttacagttcagtcattttcctcctcccagtccacactcgagctgtttcttatcccaaaccttgtccctcctcatctccaagaggatgtcccctttccaccacccccaccccaccagatctccccactccctggggccacaagtctcttgagggttaggagcatctcctctcattgaggccataccaggcagtcttctgctgcatatgagtcaggggcctctcatcagctggtgtatgctgcatggttgtggctcagtgtgagagcaatctcaggggtccaggctagttgagactgctgatcttcccatggagccccctttaccttcaagttcttccagcttttctctaattctaccacaagggtgtctgcttctgtttactggtttggtgtaagtatctgcatctgactttttcagccccttgttgggcctcttggcaggcagtcatgctaggctacagtctgtaagcatgccatagcaacaataataatgtcaggacttggagtctcttcttgagctagatcctaatttgggcccatcgctggaccttctttacttcagtctcttctcttctgttcctgcagttcttttagacagaaacaattctgggtcaggtttttgattgtgggattgcaaccccatccttccacttgatgcactgtctttctatcggaggtgaactctacaaattccctctccccactgtagggcctttcatctaaggttccttcctttaagtcatgagattctttcacctcgcaggtctatggtacattctagatagtgtgcccctgtctacatcctgaggttgcctgtttccattctttctgttggccctcggggcttcagtcctgccccacttccccaggcccctctctcccacttccctcaatgatttctttcttctccctcccaagtaggattgaggcatccacacttggccccatttggcttgttaaccttcttgataactccaatgtctcaggctctaagataaagaattgataaatgggaccacatgaaactaaaaaacttctgtacaggaaaggacataatcaataggacacttcggcaacatacaaattgagagaaaaaaaaactactctaacctcacatctgatagaggagcaatatccaaaataaataaagaactcaataagctaagcaataaaaaacaacccaatcaaaaaaaggggtggggtgggggtatagacctaaacagagaattcacaacaaaggaatcttgaaggactgagaagcacttaaagaaatgttcaaaatccttactgatctgaaaatgaaaatcagaacaaccatgggattccactttacaccaattagaatagctaagataaaaatctcaggtgacagcgcatgttggtgaagatgtggagaaagagaaatactcctctactgctgttgggattgcaaactagtacaaccactatgaaaatcaatctagagtttcctcagaaatttggaaatagatctacctgatggcccagctctaccactcttgggcatatacacagaaaacacccttccatgccacaggggcacatgttccactatgctcatagcagccttaattgtgatagccaggagctggaaacaacccagatgccccacaacagaagaatggatacataaaatgtccatctacacaattgaatactgctcagctattaagaataagagcatcatgagttttccagacaaaatgatgaaactagaaaatatcttcttgagtgaggtaactcagacccaaaagtacatgcatggtacgtactcagtaatcagtggattttagccaaaaaagtatagaatatccagaactcaagaaggatattttcaaataaatctgatatcctatgaagtgaatttagatgtgatgttcaataatcttacaggttctgcttagccaaactcaagtcactgcactttcagggtgctttgtgtcatacaaactcttaagaattgcatcagaatttcataattattcaccatacagaattcacaacccctgtagtagctacatattacatttaataattatttgtttttagataagtactccattcattatgatcatcttgaactatatctagcccatacacagtaatgctaattgtattgtataaataataacaactaaaatttccccacactttgataagctcctgaaatggtcatattactcctggatgacagcaattctgctcaagaatgaaatcctcctttattatctgttctttttaaaagatttctgattgttttgtaatgctttgtttcctcaataaactttcagaagactatgccagattttctaataaaaggcaaaacaataagagcaaaaaggaaggaggaaaggaaggataagggaaagaactctaatctgtaggagatcctgttatataaaatgacagaaaggaagattgaagtgacaaagatataagttaagaatttgaaaatggagtccaaattgtatacctcctgtagctaggaaaagcttccaatagaggttttgggacaccaaccaacccaaaaaacattctatttacaatttttcgtgccttatagatgtgcagatataaagatagagcaggtattaaggggatagacaagggatgactgatccaggtgagacctatgccctgagagttagtctactactgatactgtaaattacactgtgaatgctagacttgtagataggggcttagcataaccaatatcagaaatgcttcatgcagcaaagacacatgctgcagccaaaattagacagcttggagaatcctgtagaagagggcaggaagcatttttggaatcaaaggggtcaatgactcaaggaaacccacaaaatcaaataacctggcaccacaggagccaacaaacacttagatgctaaccagagaccctacatgggagtgacttagaatctctgcacatatataacagttgtgcagcttggtcttcaggagagactcccaccggtaggagcaggggatgcctctgactatgttatttgcctatggcatcctttctctctgcttggatgcctcatgtaacatcaataggaaaaggtatacctagtattactacaatttgtattccaagcctggttgatatccatgggaggcattcacttttctgagtagaaaggaggagaagtgaatacaggcacaggggaaagaaatgggagaaggagaaaagggaagataaactactgtcagggtgtgaagtaaattaattcagtaatcaatttaaaagaattttaaaattatcaagcttgatattactctttattctctgccatttataaattaaccaaatatttacaaatatctaacttggaagaaatgatagtagcccattgagaaattcccatcaacattaagaaagaaacaaaaccacaggggctatggagattgctcagtgaataagaatgcttctccaattacattgttatataatctctagtacccacagagaaagctaggtatggccataagtgcttgcaacccaggtgatctggaagacagggaaaggattcttcagacttgcaagctatcagtctcactccatcttcaatgagagaccctacccccaggaaaaaggcagacataaaccaggacacttgatgtctctttctggcttcctagtgtgtgcataagcacatgcaagtgtaaccagatttgtatatgccacacataattatacaaagcacacaagcataccaaaacaaaaacaaaaacaaaacaaggcaaatataaaataatggggaagacaaattccaaggaaataattcattgttggttcaaaaggtcaccacacactagtactaatccttgacatgaatgaactagtacattcattttcctctcaatagtttgattatcaatgacttttcttttgctttactatttatggaatattaaacacacagtaaatgattataagtattattacggaaataagtgttcactggaaaaaatctaaattgataaaataggacaattgcgtctgtttgtctaagtgtgtgcttattctgttgcttagggaatttccttatttactcctgtggcttctcttagctatacatttagtattatagttccatataaggaaacaacactgtgtgggcaatagacacctgaaaccctgtctttgtctctgtttctctgtttctctgtttctctgtttctctgtctctctctctctctctctctctctctctctctctctctctctctctcacacacacacacacacacacatgaacacatacacgtgcatacactgaaatgttcacactgtctctgtttttgtctgtgagtgctaagaaatacttgcaaactcctgtgctcacttcaaagttgataacttcatcaagttcttgcatgccagcaccaggatacagcatctggctgcaaagctgtttaatccccttgggagtttattggtttaaatccatgactagcaatcatataaaaatatggaaaaaccagatgtctttaaattcccgtagtatttttttttaagctggagttagtttctttccactttctcaacatttctgacaaacccaaagaaattcgtatatatttcttccttgcttcctttttgtttctctatggaagcactagggaaccagatctacaatataccaagacacctacccaattttctgacctgaaaaaatttttaaaagttactgtgctctaggcttttagctgtagcaacatttcaatcatagacaggttgacaagagaggctctcacaagcagatgttatattattttagtcttgtttctttaatgtcgactctgtatttgtgaaaatatatgaaaatagaatattgcaaaatatgttcttaattgctctgtcatattataaataattgccttttaactattgctctattttcaacattatattaattttaacattatcagacagattgtatttaccctgtaatatgagcttcaagtagttcttatgtaaatgatacagcaggattaccacttagatttagttttactttaatttttataacaatacttgtgtttattgaataatataaaccatgtaccactgataccattttacaagtatattggttagaggaagtctgtgacttcaaataatgaaatagcaaaagctgagcaatgaggagttttgttttcaatcatttgtggtataaaaacaagaaatatccagcttctctttgtccttcacatctcagacatatttatcacttcgtaaactgcaataaatttccactgaaagttttctcttaaaatattatcttcatttatctaaaaatattttattagatattttcttcatttacatttcaaatgctatcccgaaaatcccctataccctccccctccccttttccccaacccacccactcctgcttcctggccctggcattcccctgtactggggcatatgatcttcgcaagaccaagggcctctccttccattaatggcctactaggccatcctctgctacatatgcaactagagtcacaagctctgaggggtactggttagttcatattgttgttcctcctataaagttgcagacccctttagctccttgggtactttctctagctccttcattgggggccctgtgttccatccaatagatgactgtgagcttccacttctgtatttgccaagcactggcatagcctcacaagagacagctatatcagggtcctgtcagcaaaatcttgctggcatatgtaatagtgtctgggtttggtggttgtttatgggatggatccctggatgatctgagacagaaggtagttttacttttaaaatgacagagaaacctagagattaggtgacttggcaagcattcattattaggaagagatgtctggtatttaaaaccaggcaaacttatagagattaaatacttaatgcttttggtattcctaaaccttctaatagtcaaacagtacagtgtagtcagagactatggctgcctgtcctcatgccatttatctatgtatgttactctgcacagtctagttcagaccttagaaactttaaaaaaaaaaaaggcatgccaacactaaaatattaggtctttaaaaacttgaacttcattaggacctggaacatttaaaggcctcaatatttgtatctacctggttctagtttgatagtctttcctagtatgacatatttggcaaaaacaatatttcatattacttacagtagattataaatgatctacctcatttcttttaaatgtttcaaagtaccaggaaaggtattttgatgcatgtttggtatcatttctttcaatttgcaaagacaatgctcattttctacatgggtaggtctcacaaaaactcaagacctgccctatttggagtgtgctgcgcccattccatttgtaggaagcccttgacactttaatcactgctgctgagaaaaggatattggagtgtctttgttagtaagattgtacactgataataaaatggaagtgtatttctatgtatgactgaagtgtattctagtcaatatttgttattctaatatttaatatttctaactctgctagatacataagttagaaaccaatctgttttcttgtttccattaccaggaaactatgctccattgaaaattaccttaaaatctagggatttatgaggacatatcatacctttttctgaaaaattaatatgcaatgaaagtgaaggcttaagatgtagtcacatatcaactgagggacattgaaacacttcctcagttaacttgtattaccgtttgcctgatctgggaaacaagaggattcaaaaagtggtcttaaagtatgaatttctctaatataaaaattcaaaggatattgtgattcaatgcttggtgataaatgcaatagttaaaggggtaaagataatacgctgatttctaatgtcagcatgccttgtacagatgggagcctaacctcatggataattagtaaattctctcccttctgattcttctgctacgtgttatgtaggctgggtaagaaaagaaattttgtggaagattttctagaatttgagtaaaattaataccaaaatataaaagaatctgatgagattattatactcttattcccctgaacctattattttgatgaatattgtctttttcctggttcagggttggttctcaaaaattttgcacattaatacttatgatcctacccgatatatagagaaaagaggtacagtgattatttgagttgtggattttattgattattaagcaattttacatgagtagtatgactattttcactctcttctttatcctcacagtataatccaatatctggaaaagaaagttaattaatgtacattaagtgattggttaggactactatcaacatgggagtcagaaatggaataattaagcactcctcttccacccaaatgtaaacattcttccagaaaatgttttgcttcaagtttgatattaatcattgctctacacattatcacaaatatgtctgtaatcttttatggttttaaagaagttaactgataattatcgtgatctacctacctcctttccaatgtttgtttttattaaattggctgccctacttgaacgggagattctgttttctcaccattgtcctgggattactatcaggaaactttcacatgaattgtgaggatctgagctctactcctcacacttataagacaagcattgtacctagtgagtcatactcctccttctacttgctagcaaccattaactaattgattgattgattaattaattaattaattaatgtgttctcagagatttgccttaatacatgtctatgtactacatgcatgcatgtgatgcctgacaaggccagaagaagttgtctgataccctggacgtagaataaaaacagatgattgtaaaactgccattttgatgttagactaatatccagatctgctgatccatctctttagaccctctctcatcttttatgattttaagtgctgattttgaaaagaaatatatgggttttcttatacatttgttatgctagaaaattacctcaggatttcacccaagctaagtatactttctttatagccatacatctaaactctgccaaaagttttagtacaaattatattcattgattgtgtattgtaaaatgccttctgtcatttcaacactttatttttgcttgtagactgttctcttcattataagaagaatttcttagttttaacaaatttataacaaattgtatcctcatacttagatatgtaagattgtcagtctaccctacatttatgaaaatgctcttctgtgccatctcattgatgttttcatttttacatttcagttattagcttctttctgcatacttttgcttcaattacaggctataaaaaaatctttatagggaactttgtactgacagacaaccagtcctttctccttcattggtactagtgtgtgtgtgtgtgtgtgtgtgcgcgtgcgcgcgcgcgcgcatgtaaacattttgtcgggggccggggctcttttttatttttttaattttcttttcttttttttttcttttcgagtcggattgcttgtttgtgtttttcctattaatttttgaggctttttaaattattttgtttttgctttttaattgcctatttcttcctaaagagagaaagaaagaaagaaagaaagaaagaaagaaagaaagaaagaaagaaagaaagaaagaaagaaagaagaggatgtagaatttgggcgtgggtaggtaggatgggaaatgggggaaggacatcggagtatctgagggaatgtagacaatgatcagagtatattgtgtggaaagaaatcaatttttcattaaaatttctgttctgtttcttaaaagccaatctcctatgtagtgaaattagaagttccgttcatacagaattttgatacaaatggaaactaactgtcataaccaagttcattgcttgacctaatataattaaagacaaatgcaaattctctggtttatgtataaactacagtgggcctgcctgaaatctatgctgaagttaatcattctatgcccaaatgtgcaaccacgtttcatgattaaatggacagaaatgttgatgaataaacctaatgactaaactacttttccagcaacaatacactcaccccagtgtaaatcttacatgaaacttggctctgtcgccacatagagaaaagccaaaatccccttacaagtatggcatcaaatacacaatctggtaattgtggtattagttgaatacatctctctttttactaaatatgtttctccctcactatctaaaacttgtgaataaattaaattacatggcaaaagataatttgcatatgcactaagattgcatacttcaaaaataaacatggcatactgcattattgaaaaaatattaatcatggatgttcacaagtgtaatgaaatatttggagatctgatctcacaacccagcctgtggcattaattctgagtcatctagtaaccttttatagcctctgcactgcactggcaaagtgagtctacctgcatacacatgcatacataaacactcatgtgtgcacatgtgcatacacacacacatacacacacacacacacacacacacacacacacacacacacagagagagagagagagagagagagagagagagagagagagagagagagagagagagaaactttcagaaatcttccacagtgctctgtataattttccatggccatatcggatgtacgtgatgtactcctttagaatgataagttcttctacctatttcatacttcttggatattaaatgttgctttactactcagtcatacacatgcgctgaccaggcaagcagttccctgtacagcacagcaatcaaggtaattcatacctattattccagcacttgagaggcaagaagattgtcatgtgtttgaagccaaccagcctcaagtaaataaataaatcattttaaaatttaaaaaaatctacttaatctatttaatattgagaacccaatgtcacaactatgttgttactgttccatttgttttagaacattcctcttatctgttcaggaatgcttctgacaaacacagctacagtctcccatttctccacttcctagccccatcctcttctgtctacctaagtgtgatttttattaatagacccggaacaaacaaacgaacaaatcccccactattttcttaagatacactgatcataggagccccagcatttgctgcctcttccttccctttcatatgcctcccatagtctcactgaactgcttctgtagcactccttacagctttacatgtgtctgggaatttctttaaatccagaaaagcgaaagtattatctgctttgtcttatatattcatcttctagcacatgactttgcaaagagttgcaagccccataaggacttactgagcccaagatggtatctgaaatgataacgtgtccaggagctaacttaactaacagtggcctcaagtataaacactaacagtctaaaatggtctacagtcatttatagttttgtgagagagtttgacaattgtgtacttctaataaatgaatctatccttcaactagtatttagttatatgagttaaagccgcgaagtccgtatgttcatatttaaacaaaatgttgtcacagaagaataattatctgaaattcaacttctcagtatttcagagaagatatgtcaatgttataaaatcatgtatcaacccaattatgaaaatacttagattcttttacaaaataaaatctagtatcaaaaattgggcttgcagccgttatgtgtgtggcccaggctggcctcaaacatatgcctcctgcagcctcctatgcgttgggagtataaggtagagccatctggggcatggttggggaaccttaagaacaagtagactgcagcttaaaatattggggaatcacttgtaattttaaaaattaacaaatccagatgcaatcatctatggaattttttaaattagaatgtgaacagtgtgaaaactaatggtgccacgcttcagtgtttggggaaaagtgccgataatataagtggtttcaaaagtgttttcatcaacgtttttgtgagctggcaagcagcacttctgatgtgaaagtgagtgtctctctgagggttgtatttagcaaaggtcctataaaaaagccagtgtatggtggcaattaaatatgactcattccacattaaaactttagaatgcatttgctgaagtaagcttgcaaagtttcatttgaaaagctgggcttataaaaatgttttgacactgcaatgccttgaaagcagattttatttattattattattattattgcaatttattatacttagggatatttttattttattttgaaatatacctatcttttggaaaataagatcctggtgagtaacatgtgaacattcttgttctattaaacacactgcaaagaaactagaatgagtttatgaaaatattttcctaagaagtctgtcagctgtttcacctcatgttgaaagtgggaagtgacctcacagaagctagctcaatatgtttctctgataatgcggccttgggtctctgagacacaccgttgtgagcctgtgctttaataggctggtctgagaacttgtatttccttcctgaatattattcaggttctttacagtgtgtggaaaattaattcactttgttgatgttctattttgtttgacccttcctacttgcttatccacctgctatatttggctagaatctacaaattgctactttcttttaaaataatttctgtttttctatacaagaagtataaatgaaataagaaacactcatcgatatggaaagcccataataaatgctataagcataccatgatttttcttttacttatttgatatatattatcttgttttaggataaaatttttagatataatatatacatttacttcaactgtttactcagctgtctgtttaaagattaatgtcttattttcactataaaactaataaatttaggagttaaacataaggatcaatacacctgttaattatctcaatatagacacttgaaaatgtatacttattttttaaaaaatatgcatgatacatagatttctattttcagatattaatttcaaaactatagaaaaacttagatcatgattgtgaataatagactgtgaatagtagactggggaaaatgaatcatgaccttttaagtagatgggacatgacagaaatttcatagcagattcagtactaatgcagaaccatttgtatgtgacttttttaaagggagctgctttttagcttggcctcagtttcattccatctgataccatacctactgtgaatctatgtctatatctatgtctatgtctatgtctatgtatgtctataatacaagatatatagtcaatgattaataggaatctattcaataacatcagtaaatcagagcgccactgtatttatcttacaataacaagaaaattatttatcatcttttagctataaaacattttgtaagacacatttgttaagacagtgtacattcttaatttacaatatcaaattattcaagatttctcttgaaatgagtataattttcctgctattattgattggacaattgtatctcagactactttaaagacttgttcaagatagcacagcaatggaatgctagaaatgaattgaaaaacctagatttctatgtacaagctttcaatataataaactgatttgcataaccatttccaataacagtcatctttagagagcaaagcatctcttcaaaaatgtgtgtgtgtgtgtgtgtgtgtgtgtgtgtgtgtgtgtgtgtgtgtaggtgtgatgaatatttatttgtatgcaccatactcctaaaaggagaaaaagccagaaaaaatgtcagctctcctataactggaaatacagtcggctgctctgtgaattttatgaaccaaagccagattctttgcaagtgcagtaagtgatcctaaccaccaagaaaggtttccagaccaaatagttcactcagtatcttactatgtagctatcttttcctggaatacacatatagaatatgatggacattaagtcacagaaatcctcctgcctctgcttcctggtacaaaatgtatttttaaaacatttgtagacagttaaaagagaaaatcatttgaattttctcacataaacaagtggaccaacaaaaactatactataaaatatgaaattaatgggctggagtgatggctcagtggttaagcgctccgactgcacacccaaaggtcttgagtttaaatcccagcaaccacatggttgttcacaaccacccattatgagatcaaacaccctcttctggtgcatctgaagacagctacagtgtactactgaataatactaaataagtctttttaaaaatgtgaaattaaatttatgctggtcactagaagggtggtagatagtggtgaccaaattacaactgtggcagagagattagttttttaattctacaaaataatgaggtaattaagatttacaaaaatgtatcatgcatttaaagggagtcatttggagtatcttgactcacaaaaacatgttagatgatattaatactaattacgcttattttttttcattacatagagtatacgtgtatccaatcatcatgatgcactccatagaatgtggtcaaatattatagtgactgaaaaagtagaattggcaaaaaaaattacagtctaaattctatgtttagaccctaaataatataataaaacgggttgctaataggaatcagtagactgagcaagttaaagatcacacaaacatacacatgtatcagtagactgagcatgttatattatgacactcacgtgtatgtgaatatatatgaagcacaaaaaaatatgtgcatgaatttgagagggagcatgagaaatacatggtagtggttggaagaagtaaaggaaaggggaaatgatgtaattatatattttcatttttattggttattttatttatttatatttcaaatattatgcccttctaagtttcccttccacacactcctaatgccctccccctgctccctgattctatgagtgtgctccccaaaccacatacagattcccaactctgcaccctagcattccccgacactgggtcatcaagccttcacaggacgtagaggctcccctcccgttgatgccagataaggcaaccttctgctacatacccagctggagccatgggactatccatgaggactctggttgatggtttagtacctgggagctttggggtgtctgcttggttaaaactgttgttcttcctatggggttgaaaaactgtgctacagagcaatagtgaaaaaacaaaaagcaagaaacaaaacaaaacaaaaatctatagtctatagtattggtgcagatacaggcatgtagatcaatgtaatagaattaaagtcacagaagtgaacccacacacctatggtcacaaagaagtcaaaaccattcagtggaaaaacacagcattgtcaacacatggtgctggttcaactggccataagcatgtagaagaatgcaaattgatccattcttatctccttgtacaaaggtcaagtccaagtggataaaggatcataaaaccagatatgctgaatataaaagaagagaatatgtaagaaccttgaatacattggcacagggaaattttttcctgaacagaacaccaaaggctcagagtctaagatcaacaattgacaaatgggacctcaaaattgacaagcttttgtaaggcaaaggacaacatcaataggacaaaacatcaacccacagtttgggaaaagataattaccaaccctacatctgatagtgggctaatatccaaaatatacaaagaattcaagaagttagactccagagaaccaagtaagcctattaaaaatgaggtacagagctaaacaagacttctcagctgaggaatctcaaatggctgagaagcacttaaataaatgttcaatatacttagtcatcagagaaatgcaaatcaaaacaaccctgagattccacctcacaccagtcagaatggctaagatcaaaaacgcatgtgacagcagatgctggcgagaatgtggaaaaagaggaatgctcctccattgctggtgggattgcaagctggtacaactgctctggaaatcagtttattgcttcctctgataattggacatagcactactgtcagatcaaacaatatcactcctggtcatatatgcagaagatgctccaacttgtaataaggacacatgctccactatgttcagagcagccttatttatattagccagaagctggaaagaacccagatgtcccacaacagaggaatggacacagaaaatgtggtacatttacacaatggactactatgcagctattaaaaacaatgaatttatgaaattcttagacaaatggatggatctggaggatatcatcctaagtgaggtaacctagccacaaaagaactcacatgatatgcactcactgataagtggatattagcccagaagctcagaatacccaagaaacaatttgcaaaacacatgaaactcaagaaggaagaccaaagtgaggatactttgatccttcttaaaaaaaaaaaaaaaaaaaagaagggagaacaagctaggcggtggtgacgcatgcctttaatcccagcacttgggaggaagaagcaggcggatttctgagtttgagaccagcctggtctacaaagtgagtttcaggacagccagggttacacaaagaaacctgtctcgaaaacaaacaaacagaagaagaagaagaagaagaagaagaagaagaagaagaagaagaagaagaagaagaagaagaagaagaagaagaagaagaaaaagcgggaacaaaatacccatggaaggagacaaagtttagagcagagactgaaagaatgaccatccagagactgtcccactttaggatccagcccataaacaaccaccaaacccagacactattgtaaatgccaaaaagagctagctagcttgataaagctgtctcctgagaggctctgccagtgcctgacaaatacagaagcgaatgctcacagccattcattttacaaagcacagggtaaccaatgaagtagctagagaaagtacccaaggagctgaaggaattttcagccccataggttgaacaacaatatgaactaaccagtatccccagagctctctgggactaaaacaccaatcaaagaaaccacatgataggactcatggttctagctgcatatgtagcagaggatgacctagtcagtcatcaatgggaggagaggcccttggtcctatgaagggtctatgtctcagtataggggaatgtcagggccaggaagcaggaatgtgtgggttggggagtatgggaagagaataggggattttcagaggggaaagtagtaaagtataattataacaattataatttaaataaagaaaatatctaatgaaagagaaaatctaaaaaaatagaaaataaccagtaaaaaagaaaatggaaataaatatggtacatttacacaatggagaactactaagctagtaaaaacaatgactacatgaaattcacaggcaaatgtatagaaatagaaaatatgcagctattaaaaacaatgaatttatgaaattgttagacaaaagaatggatcaggaggatatcatcctaagtgaggcaacccagtcacaaaagaacacacatggtatgcactcactgataagtgactattaggaaaaattcttggcatacccatcatacaactcacagacaaaattaaaccaaagagtaaggaagaccaaagtatggattcttcagtcctactcaggagggggaagaaaaggaccatgggagctagtgggaggaggagaaaaaaaggagggcaggatcaggtgtggtaggagaaaaggagacgtacagatggtcaggaatttgaatggaggtgtgtagcagtgggggattgggaagtaggggtagtcagtagaaagtcccagatgccaggcatccaagacattcccagaacacaataaaggtgacattagctgaaatacccaacaaagtggagatagaacctgtgaagaccacatccagttgatagctattaccccaggtgagggatggggacacccagacatctcaaaatattaatccagaattacttctctcaaaagaaaatggaaggccgggcgtggtggcacacgcatttaatcccagcacttgggaagcagaggcaggtgaatttctgagttcaaggccagcctggtctacagagtgagttccaggacagtcagggctacacagagaaaccctgtctcgaaaaaccaaaataataataataataataataataataataataaatttaaaaatgcaaggaaaaattggagcagagactgagcagagactgcaatccggagactgccccacctcgggatccattccatttgcagatacccgaacccaggtgctattgttgatgccaagaagtgcttgctgacaggagcttggtatagctgtctcctgagatactctgccagagcctgaccaatacagatacagatgcaagcagtcaaccattgtactgagcacagggatcccaatataggagttagcagaaggactaaaggaataattatattttaatttcaaaaatatatttataaaactgatattagatttcaggaactgcatttttcttaagagttaatgagaacacatgcaacaaaatattcaataatccaacaaccatgtgtacaagtttagatattactattatgtgaaattcaaaatattatatggaaaaacagtgattcagccttccatgaagtttccatgtactcaaatctgattaattaatcaatcaactgccattaagttaaaaacattctaagtctgaattttctatctttcaaagattccaatcaagcaatgccatccaggaaatcaccttggaaaataagccaaaatatgagcccctccatgattatttctttacttttatttcatccagagaaaaagagtccatgtgtgtttatgttggaaatagtggcttcctgccctctgcaattattaacaatgtttgtataacccttaaaatgtacctgcattgatctagtctgctgtatgaacagcaaggtttatgaaacacaaaaggcaacatgaaactgaagtcatgatttacaaagtgagccaggtgtgaggagaatgaagagatcagcataatgagtgttcataaatttgaatatttgttgtgaaaggcatttaatgaaagactagggatgcattacttaaaacaaacaaacagccctcttcctgtataaagcttataatccagcagcagccatcagaagaagaccaaaaacctgcattatgctcactatcttaaacagtaatgactgaagagaaaggagaaacagcaaaggcctgtaggaatttgtcatgttaagtagagcttttagaaaacatctatttgaaactacgacaaaattcacagaaggcttgaagcaggagagaactggagacacagagatctacattccaagaattgggaagttcatgtctttgaacttaacaggcatttcagcttctaccatcctctcatgcttctccctctatctgacactgcctgaactgtgtcttaactctatgctaatgactggtcacactttaacaaataacacagatgtaatcgcaatataagtggatataaaaaccacagaaagaatgcaggagttagagagattcacagcatccattttatacctatggttttccgattctcaatctgaaagctgtgctgcttccccgtcttaggccatggaagtaactccttggcagagaatgagagaactctccctactattcaaactcatctagagtattaaatcctcatttggatttattgctaacaaatctgacaatatatgagacttgcctaagatcatgagctttataattaaattttaacttgaaatgagaacatctgggtactgtttctgctataacagaccactgtatctatcatcctttgtgttcattaacatgacttaatggaaaagtatgtggatgtatagaatttaattttgtttcaccaagtgaaaagtaacatgtacagtaagtagacagtgcaatatattatttataataagcacatggaactggaaatttagctcaaataataaaggagttgtcctgcaaagacaggacatatgtatgatccccagaatccacatgaaggaaaatgtcctggtagtattgtacacgcttctaatcccaattcttggaagccagtgtcagatggatcctttgggatctttgggaaactaacctgccctgggttttcatgtgtactacagatagacatgtacacctcctcccatgcttcaacacatatgtgcatacccacacatgtgtgcactcacaggaacatccacatgcaaacacatacacacatggaacgtacaaatgctacatatatacatagaaacataattctgataagtcttggatatttatttaatattggtgatactctttcacgttttctcaggaatcttactatctttcttatttgtgtcctatattttcagctgactgtgctcctgtcataacttagaccttgaatgtcaacttctctaatgaatctgtaatgtaaatatggactgacaataattatccagaagtttgaacctattataacttctgcaagtatccccatgtctggctctttgcacataaagagcattttgtaattaattctgagctaatatattataccaatataccatactacttatataattagaaagcatattattaactgtttttacactgttactagtacagttttgtatacaaaaattagaagtttctaacaattagaaatgtccttaaaataatactctttagaatcttcattttgcattttgcaaaatgtttaaaagataaaagtagtcttttacttttggtatgtaataaaaatacatggttgtgttgaaattaaaatcctgtttaataacattgtttattcctatattgggtctatttatatttaataagtaaaataaagtttacatatgtatatgaaagtatatataatgtgtattttcatatgctgacataaacttaaaatagtgttggtagtatgcattgccctgtaaagccagaatataataagcacaggcagaaaggtctacaccttgtacaacctactcaagaactttaaatagaataaatatttgaaaaaaattcatgagtgacaatggagtcaattgttctcgtcatgtcaagattgacatttatattctgcatcatgaatatgtgacaatcatctgcttgagtcaccaggcatgacatttacttcttcccttaacacgctattgtgaacaaaaaattaaagattatctctcaccactcctttgagtaatacatctacataccctctaattaagaacctccttgacggaccccaccccagttttgcataattttctcatagaacacatatgacaagagtttgtcaagaagtggagttaaggtttatttgcaaataccgagcatctgtctttgcatatgagaactagagtttcactgtgataattacacaaccacaaataaaacttggcatctgacctcttggttgactgtatgttcccatctagagacgaagtgaagaggaagtgtgaaacatttgtatgagaattgaaatctattttttcacatgtattttagagattgtcatgcaaaggtagggaattacatcatttttcaatccatctcttgtccctctaattccttccatgtcttttctctaccccctcctaaactcatgacctcttattcattcattattattattattattgataattattattattagtagtagtactagtgtcagtattagaggtagtagtagtattgtcaatttgtgtgtttgtgtgtttacctgcgcgcgcgcgcgcgtgtgtgtgtgtgtgtgtgtgtaccatctcctgtgtccaattagaattactcctgtctgtatatatattttccccttaccacttgacaatgaacaatcaattaggcactcatacctgcacaagaccaattcttctctagtagctatttattgcctgtagatcctcatctattggttgagccttaagatttttctcatctatattattttgccaaattgtgttgatcttttaaccaaaggttgagagaacattgtagaagatagagcagaaaatatgtgaatattttaaaatataaatatgtgtgtttcatagaccatgattctttcaaaacatcaactaaattttacaacttttatagagacagcattttccctgcacatttacattccctgtacatttcatttcatggattcctttaacctttcctctggtgcccatctcacagtgatgagtatgctcagatcttatagtttttaaaatgatatattttcatactcattttggaaaggaatagttttgctggtcagagaagttaggttaactgttcttttatgggggtgtatcttgatttgtaagtacaataaggttatgaataatacttcatgttcctctttcttgaattttctctcctaaaaaatattccagttgctttaatcattgtttctttgaagagatggctcatctttgtctgcatgaggacttaatatatcattactttgcagcagtaacatgatgtgtctatgttctcttctgaatatttctcagagcttttgagttagttccattgatgactttgcataagagtttttattatgcttgaaatttttcccattattgttgccatcattagttttcattctattccataaaaatatcaaatttatagtttaacctatgcccattttttccttgtccatatgaatttggtcctttcatctggatgtctatgggatagttttgttgttatggagtcatgttgagtttacagcacctactctgttttcaatgctgttgagtattatttttcatcttatttaatactctttcatttaattggacgtattttacaatctacaatgtttatcttgttcattcctttcctctaattttattgaatactccctctttctcatataaagtatatcaagactgtaagacttttggctactttatggcttccttttcctaccatccttctctatccctattccaccatttgaacctccctcccacccctgcaacactaggtgggagataaagaaggctagagaggaaaagtgacattgatattagtagactacttcttgctaattaggggtgtcacattccttagggtaagatttttcttcaaagttagcatatctaatttcttcttattatttctttatgcatgactacttgataaacagtggcaacagcaaggaacaaccaccagcagcagcagtaacagggggagtagcagcagccacagcctctttttatatatcctttgtgagtcctcagaatcctaacagtcatacactcagaaactgcatggggctgtcaaaattacaaccctgctagagcatgaggcaagtcatagtcagctgctgagagcaatcaaaaacacacatatatcacacagctaggattaaacacaactataacattgctgtgtttttaaagaaaccagaaaaccagaattcttactatttgtaatcagtgcttaattcttttatctattacttcctttacggaggacagcagtggtgctgggacaatttatctttgccaatgctactggagcaaatgtccaattttgtataagtcttgtgaagttaatgatggctatagtgatttcactagtacaatggctgccatgacaagagtatatctttttgttaccagtcttcccatcctgtactcttacattctttcagatcttcttttgtaatgtctcctaaaccatggggaaggtgttaattacttctatctcagttcgatctgaactttccatcatcacataagtcacttacgtcagttatggttttcaaaattggtccttgtctgctgtagtaaggagcactaaatgcctttccacccatgcttgggacaagtagcaataattaaactcaatgaggcaaacacaaaaagactttaattatttttatttttcatgggagttaggactttcttattatttaccaactttagcagtgttcgtgtgcgtgtgcgcgtgcgtgtgcacatgtgtgtgtgtgtgtgtgtgtgtgtgtgtgtgtgcgtgaatgcatctatgatcagaaatgggctggaagaggtgaggttgaattgagtggactgactcagaccacagctactttaaacgtaacattaggaaatgtggagtaagtcctgtaggtagtgggaatctaagaaatctagaaatggatggatgtttccctaacatgtgtgtgtaggatgtttgttctgcccatggaacaaactcagctgggaagttatgaggccatgatccttaagagagcagggtttatcataaatataaaaaaaatcctgtgataatttttagatctcaactaggtggagacaaggattaggattgccactgacttaacactggaaataatgaatggcgccggggaaaagaaacttttgagaggtgggattcatatcactgaaatgtccaaatttaggtgacagcttatttcccaggggactgggatgttccaggtactcctagcatctggaacagctgttcatatgaaaggctgcctgtctcttgcacagaagacagaatatccctatgcatagtctaccaagttggggtgctaaggaaggcagcttggttgcactgagaaggtgcttccctccagttttcatcacctacctggaactttgccaaggggaggaacagcaactttgctaccatcctctttaatatcatcgagatttaggatggagggtaaatttattcatttgttcttgattcttgagtgacaacgactcaatctacctaaggaggcagggacacctttataatccgacagggtctagagaaagagtttaagaccaatctggactacataaagatcctgcctcacattaaaacaaaagaaattaaagtcaaaacaaaatagaaacaattaaaaatggaagttcattaagtcatttttttaaaggatgagaattctaaaaatctaattttctggccatcctggatcccacaatgttttattgctaactgcgactgccaggccatgtactatctctggatccttgccccaaataccttacaaactgagctgagcatcccctccaattttactgcttctcttttcctgagcgacttatctctccaactgtgacatgaaccagtctgttacatggaaagagattaattaaactgagcggttaagatgataaaagtcattatccagcagagacgttatggttgtgtgggaagaaggcggggcaggagaatgggtagaaacagaacagccaccattagcccagatgtagaagcttcacctagacaaaaataaatcaaaatcaattccaagttgttttttttttctttacttttttattagatgttttctttatttacatttcaaatggtatcctttttcctggtttcccccatgaaaatctcctataatctcccccctcctcctgttcaccaacccacccattcctaattcctagccctagcatacttctatactggggcatagacccttcacaggaccaagggcctctcctcccatcaatgaccatcttctgctacatatgcagctggagaaacaagtcccaccttgtgctttctttggttggtggtttagtccctgggagctctgggggtactggtttgttgatattgttgatcctaatatggggctgcaaacccctttcatctccttgggtattttctctagctccttcattggggaccctgttctttgaccaatggatagctgtgaacattgtttttacaagactgagtctccagagtgctccctatcaaaagcagagtctcaaattcagagacactgaatcagaaagagagatgtttgcatgttcaaagatgattatctggaacatgtgcatgtttgcatacacttgggatattgtttggcaacaccagtgactatgaacatgaggaactgtgatagtaaccaatagtaagcaagaagcctgttacaaaggacaaatggcacaagagtagacaggatggatttgtgccaaaatgaccaccaactgcctgaatgacccctagttaaccctttttcctctttaagcctcacttttacctccttaaaaatgagaaaggttcactcattttggcttaatgccaacctcttatttagttccattctttccttcatgcacaaatccttacaacattgatatgaacaaggagaaaattcgtagaacttgggtttatctgtgtaatatactatgaaagtgacactcagtatggcaagagaggatgtaggtagagagaaggaaaagatgggagagatagagtccttatggttttgataagatacaaatttatgaagactctcttcttctttgctgggtaatggagttttgcacgaggaaataaatgatttgtgtctattaaagaagaaagagcaacaaccgcacatttctgagagcctcattaaatgtgttctgtttcccacactgtcgctgctcatttgggtgagcactgaagtgcacaataaaaggctgaattaagtgcagggctaaatgaagcaattaattctctttctctcttctctctaatacaatgaaggtgtgaatcagaatgtagagtagcctgaagttgacccttgctatgtctgcttcttgccatatatcttctggcaagtgcacaaagcactgtttctctccatctcagactggatatatgcctattcaaatcttaaaaaatagcttcatagtaaaatgtgactttatagaatagtagccataatgaataaatctctgaccagctttggtaattaaattttaccccctcagtcaaataagtttaagtttgggctttacacttgtcagtgcttaaaacgaaaaaagcataatttggtacataattttagaaaaataaatctttccatgactttaggtatgactagtagataggacacagattacttgtagacacttgtagagttcatggagaagtgggttttattaatgtgtgtacatgctcctgtgtgtgtggatgcacatgggtgtgcccatgcagacatcaaagttcaacaaataagtatttatatcatcctcataaatgtcattcagtcttattttgttcagaaggaaagaatttatttggtcttacaggttatagtgcatcatcgtgggaagccaagtcaggaactcaaagcagaacagaaacttagtcagagaccatggggaccgctgcttactagaggaagctcactttctctggatgttcatctagcagttctacatagtccatgcccatctatggagggatggcactgctcactatggtatgggccctccgccattgtcttgagaatcattaaaatatgacaagaaattcatataggccatgaagacagtctatcaattgaaggtttctcttcctaggtgtgttaaccatggagattagccagcataatacacaacaatagatgtttataaaaaataccagagattttgtatcacttatcaattttaaggtagtaaacctaaatccaaattttgcaattttaaaagtatgatttttttctttttttttttttattacgtattttcttcaattaaatttccaatgctatcccaaaagtccccctcccccgtcactcccctacccacccattcccatttcttggccctggcattcccctgtactggggcatataacatttgcctgaccaatgggcctctctttccagtgatggccgactaggtcatcgtttgatacatatgcagctagagtcaagagctctggggtactggttagttcataatgttgttcctccgatagggttgcagttccctttagctccttggatactttctctagctcttacattgggggctgtgtgacccatccaatagttgactgtgagcatccacttctgtgtttgctaggccccggcctagtctcacaagggacagctatatcactgtccttgcaatatgatttttaatataaagtagaagactggatttcaaggacatgaagcctaacctgattattaataagagtttatgcatgctgagcaggaatgtatatgtagcagaggttggtcttgtcagacatcagtgagaggagatgcccatgatcctgtgaaggcttgattccccagtgtaagggaatgccaggacgggaaagcaggagtgggtgggtttttgaggggaaatgaggaaaggggatagcatttgaaatgtaaataaggaaaatatctaatgaagaaataaaaaggaaaacagagattaccccatatattacagaggcagctattattaagtcataagataataataagtagaatagtgaattttgatataaattttagcttttatcattaagaggtaaaggctatttctaactacttgttctattgtatttcaaaaacaagtttttcaagattcttatctttcctaatctaaggtatagagaaagaaaatattaattttaaaaacaagctgatgattttcactcttaagacaggatttctcaatggtctggagctgaaaattggtctagacttactgaccaataaatttagatgccttcctgtcttctttttcccaaaactggaattacaaatatgacactgtacttgcccttcatatatatattttgagctactttcttagtagatattttctttgtttacatttcaaatgttatcttctttcctggtttcccctcccaaaaaccccctttcccagccccccggccactgctcaccaacccacccactcctgcttccctgtcctggcatttccctaccctggagcatggaaccttcagaggaccaggggcctctcctcccactgatgtccaacaaggccatcctctgctacacatgcagctggaaacatgggtccctccatgtatactctatggttcatggtttagtccctgggagctctaggggtactggttagttcctattgttgtttctcctatggggctgtacctcatttagctcctttgtccttcctctagctcctccattgggaaccttgtgctcagtctaatggttggctgagatcttccacctctgaatatgttaggcactggcagagcctctcaggagacagctatatcaggctcctgtcagcaagctcttattggcatcaacaatagtgtctgggtttggttacagtatatgggattgatccccaggtggggtaagtctcttgatggtctttctttaagtctctgctccacactttgtatctcctccaatgggtattttgttcccccttcaaagaaggactgaaatatccatactttgatcttccttctttttgagcttcatttggtctgtgattgggaaaagatctttaccaaccctacatccaatagagggctaatatccaaaatatacaaacaactcaagaagttagactacagagaaccaaataaccctattaaaaaataggttacagagctaaatatagaattctcaaccaaagaatatcgaatggctgagaagcacctaaagaagtaggatacccaagatataagatacaacttgccaaacgcatgaaattcaagaagaacgaagaccaaagtgtggacactttaccctttcttagaaatgggaagaaaacaccgatggaaggagttacagagacaaaatttggagctgtgacgaacggatggaccatctagtgattgccatatgcagggatccatcccaaaatcagcttccaaatgctgacaccattgcatacactagcaagattttgttgaaaggacccagatatagctctctcttgtgagactatgccagggcctagcaaacacagaagtggatgatcacagtcagctattggatgggtcacacagcccccaatggaggagctagagaaattacccaaggagctaaagggaactgcaaccctataggtagaacaacaatataaactaaccagtaccccggagctcttgtctctagctgcatatgtatcaaaagatggcctagtcggccatcactgcaaagagaggcccattggacttgcaaactttatatgccccagtacaggggaacgccagggccaaaaagggggagtgggtggataggggattgggggggtgggtatgggggacctttgggatagcattgaaatgtaaacgaggaaaatacctaaattaaaaaaaaaaaagaagtgctcagcatctttaggcatcagagaaatgcaattcaaaacaacccagagattctacctcacaccagtcagaatggttaagatcaaaaactcaggtgacagcacatgctggtgaggatgtggagaaagaggaacattcctccatggttggtgggattgcaaactggtacaaccactatggtaatcactccagcagttcctcagaaaattggacttagtactaccggaggatcccgcaatacctctcctgggcatatatccagaagatgtcccaaccggtaagaaggacacatgctccactatgttcatagcagccttatttataatagtcagaaactagaaagaacccagatgtccctcaacagaggaatggaaacagaaaatatggtacatttacataatgaagtactactcagccattaaaaacaaagaattcatgaaattattaggcaaatggatgggactagaaattatcatcctgagtgaggtaacgcagtcacacgcactgataagtggatattagcacagaagcttggagtatccaagatacaattttttgagtttcaaagttagatcctattgtgtttaagacaagcatttcccacttgtgtcttctccctgccttggaagtgggtttcaggttttgaatgagtaatgtggtagttctgagcagtggtgtgtgcttcttcttttcagtggaccaatgagaactttcttctcccagaaacttgctattattctacaaggcaacttttgtcaagcatattacataatgccaagtaaattctaagcactttgaaatgcttactgtcttttccatctgcctcattcttgtaacttcacaaacacaatacttattttggtataatataataaattactcatttcttagacaatatacatatccccaacacaatgtgaccataattgacattagattttcattgatgatagtgtactctgattattcattctttctgtcctttggtctgccagtcacatttttttttcatggaaagaatagggtgtgaccatgaaaggattaaggcaagatctcatacaatactacaacctgcagatatctcatatgtacctacagctttcagacatggaaggtttttcttccttattaaaatttccagaaaaaagtaattattatagcctaattatggggaatatgtgagctaatgtagaaatatttaagtaaatgcttctcaaaatgcaaactatattccaggtaccctgctatgtaattaggacacaacttatttaattatccccgcagtatgattatactagattctcacctaactggtgagtccagattatcaaatattgaaaaaatatttaataatatatcaacacaaaatattaacaaaatgtaatttgtgaggttctcattaaactattactagcttttaatagaaattagtaggaatgcttacaccagaaattggcagacattactatagcactgaagattttgaaataagtgaaaaataacatcaacactaaaatataactgaagcaggaaaatttactttattaatgacaaagtcattctgtctatctttcacatctctgtacaacagcattactcagtgatactctacgctaataatatactgcataagtgctcaataattattagcaaccgttcatattgaagtgggcacttccctcactgcatatctgtgccttctttttcccagctctctcatccttgacaatataagtttttttacctatgtactgatgaaaagactgctaataacagaatgatcattactatttttgttcccactttatctttgatatattgcaaccatttaaagtggatatagaataaatcatcatttcctagtatacaaatattttgggggaccatgaggttgaatatttgttgctcacttagttagagattacaggtcagagaatgctggtttagagactattggcaacctcagtgtaatgaaaagaaatctgttcaatggaagagtgataggacagtgcagcaagctgtattatttttcccttgggtttatactaattagcagagatgttgtgataaaatgttctgagtcaaggccagctataccactagtttggggaagtaattatatttgatcactttttttaagcacacaaatgccagtaggccaatgcttaaagtgataattgatggagaaaagggtttgctttgtttgtttgtttgtttgtttgtttgtttttgtttttgtttgagacagggtttctctgtatagccctggctgtcctggaactcactttgtagaccaagctggcctcaaactcagaaatctgcctgcctctgcctccccagtgctggtattaaaggtgtgaaccaccacacccagcaagaaaagggtttttaaggtgttataaattagaaaaagaatctgtcagcaaagcttatagctgctctatgcttttggagtctgtactctcctgatgaagtcaaggatcctgtttactagatagtcctaggtgctaaggactttgagatgatctttacaaagttcttgatcacaaaatattctgagaacatactgccaaattaagcagttagtcctcatgactgctggaaggataaagcataaaggacatacaagtcttctctagagcactaggaagagaggcacaaacatcagtgactaacacaataggttgtgtgaaaattctagattgagagactatgatttcagactgaccactaggtattggaaaaacaattgttattctcacacctaggagtgactaaattcaataggttgtcctgcagtcctttgtctaggagttgtgccctagaaatatcctattctataaaagcatgtctattgataatttccttgtttgtatccttgtgttaggcaactgcatatttaagaatcttaagtatagtgtattttccctctaaatgataggacacacaatctttaactgacttcatgttgctctggctgttataatctgtttccttttttgtgatgttccacgaagtttgctcacatgagttgtattctaggtgaatctattaaggctgggcttaatgattaattcatgattagttcattgctacatattggaaagttgtggttttctgtgatgaaccctttgctgcaaagaaaaatatccttgatatgaggtaaaagctacactcatctgtggctataagaatatatttaagaatgcagtctgaatttatggtagtctattaaactgtcaatcaaagcttttcctctatgatctatgacctcactagaaccaagtatttggctaggtatctaatatcaaatataattttttcaattgattagatcatccaattatatatttgttaacacaaagatatgagtggcactctaggagtatctgacaatgagattatttggttcattggtatcacaactggataggccgttgcttacatccattggcactgtgtataactccttcaggcactagaaataataccagtttgaatcatggaaccctatgtcaaaagtgttcagtatctttagcagtagggactttcctttaaccaagatacaacaatagtccatgaagtttgggagccagttgaactcactttagcaacaacccaaaaaaagtttttcttgtgctagacagcagaggtttcattagatggattatggcccttttgatgaacattgtaatacgtagaggcataacttcatttagatatatatgaatatgtatgtatttacatatggataaaaatatacccatatgcatataacattaagtaaatataaataaacccgtaaagtttgatcaagcatccttagtattataaatagctcccctcccttgggctgatttccttcctccttcacaaataaagtagattttaactatcattctaaataaataattatttttgtttaaagtgtaacaatgtctttcttttacggaatccggtcaggttttaaaagtgattcatatttacaaatctagtaatatgattatcatatatgttctcagaattctttctgttaaaatattccaaaatataattggtcttttctaccagggattctgcattcactaactcaaagacagtagatcatagttattcaagaagcaggtgcatctgtatatagcatctgcagattttttgtcactgttccattagtaatataagaatcattctcattgcacttatattaagtaaaccaggggtgatttaaaggatcctagagtgtgtgcctaaattacatataagaactacgctattccatgagggacttcaaaagtctcagatttttatttacttagagcaagatttagcaataatttacttttgaaatatgtaataaataagagacacaacctctgctgagtatatgaagcttatattctattcagttcaaagtaaacaataaattaaaatagacaattaatagaaagcctgatgaggcaaaaaatggatatgtgaatatccaaatgtaggtagatacatagataagaaacttatatagtttggtatgtattatacagttggagttatagcacagtaactgggcaaggaagagattttaaatatgtcgtgcctctaaaatatcctttgttctgggagattgtttcataaaaaataaaatctcaaaattgacagatgaagtcagtaccaatttctctttgtgtatttaacagagttttcacaatttctcataacctttaaagagtttactttcttaaatacttaaatttatcaaaatttaaatttactcctaatgtatgcattaatacacttgggaaaaatcaaaaatgattaattttgcataatagttctctttgatgctacaaccatatggcttctatatagacaagattcgctacattttacttagatgatttaattgtcttgctttttaaaaggtgccagtaacaaaaatcttttccaagatctaaagaacagagtttgaattggttctacaaaaaagcaaaagtaataaattgaatgacttgactaaggatcaaatattcttttgcttctcctgttcttaaaacttatgaaatgtctattcatatttccttgtccaacaggatccaaaccttgctgctaagggaagaaaaagtgcttgttatcaagtatgacaatctcctttccttccagcttcaaatgtaaatgaaatattatcaattaatacagttgctaaaagtcttatcgttcatacattttaaattggggaagacataagaaatgttagatatttcatggttttataatttttgttactggatactcttacaagaagatttgatattgtgaagacaggcgataacttgcaagagagccttggaaagttcaatattggcttgttttgccttgtgatgcatatgacactatattttaattatcaaaaatatctggaatgtgaggtcatttataaaggcaattctgactatgaagttattctcccacctctgatgttacctgaaagacatcatcagttttgcctttgaaacctaaaatcagtactttgtgtgtttctgtacttataaaggacaaagattcatttttagttggtgtaagaaagcaggatgctgcctcagcggctctgtgcttctgcccgtcccagaagctgtccggttctctggcgcaccctctaacctgttcagactaatttcctaagttctgctgagtcccggaaccaagatggcgaccgctgctgctgaggctgaggccgcctcccaagccaggcagacacctgtcctctggtccggatggtggccggctgtctgcggcccgccaagggcaagaattgacaaatgggacctaatgaaactccaaagtttctgcaaggcaaaagacaccgtcaataagacaaagagaccaccaacagattgggaaaggatctttacctatcctaaatcagataggggactaatatccaacatatataaagaactcaagaaggtggacttcagaaaatcaaataacccattaaaaaatggggctcagaactgaacaaagaattctcacctgaggaataccgaatggcagagaagcacctgaaaaaaatgttcaacatccttaatcatcagggaaatgcaaatcaaaacaaacctgagattccacctcacaccagtcagaatggctaagatcaaaaattcaggtgacagcagatgctggcgaggatgtggagaaagaggaacactcctccattgttgttgggattgcaggcttgtacaaccactctggaaatccgtctggcggttcctcagaaaattggacatagtactatcggaggatccagcaatacctctcctgggcatatatccagaagatgccccaactggtaagaaggacacatgctccactatgttcatagcagccttatttataatagccagaagctggaaagaacccagatgcccctcaacagaggaatggatacagaaaatgtggtacatctacacaatggagtactactcagctattaaaaagaatgaatctatgaaattcctagccaaatggatggacctggagggcatcatcctgagtgaggtaacacattcacaaaggaactcacacaatatgtactcactgataagtggatattagcccaaaacctaggatacccaagatataagatacaatttcctaaacacatgaaactcaagaaaaatgaagactgaagtgtgggcactatacccctccttagaagtgggaacaaaacacccttggaaggagttacagagacaaagtttggagctgagatgaaaggatggaccacgtagagactgccttatccagggatccaccccataatcagcatccaaacactgacaccattgcatacactagcaagattttattgaaaggacccagatgtagctctctcttgtgagactatgccggggcctagcaaacacagaagtggatgcccacagtcagctaatggatggatcacaggactcccaatggaggagctagagaaagtacccaaggagctaaagggatctgcaaccctataggtggatcaacattatgaactaaccagtaccccggagctcttgactctagctgcatatgtatcaaaggatggcctagtcggccatcactggaaagagaggcccattggacacacaaactttatatgctccagaacaggggaacgccagggccaaaaagggggagtgggcgggtaggggagtgggggtgggtgggtatgggggacttttggtatagcattggaaatgtaaatgagctaaatacctaataaaaaatggaaagaaaaaaaaaagaaagaaggatgaacagacataaaatttaacctatgttcttctataaatactattaaatactttacaactactctaatctatatttttgtatattcaagataagcttgctttatcatattctagtgagtaaaacaaagagagaatttgcatgtcggagcatctgtacagagcaagcagttaaggaatttattattactattgtgctgatatttctgaaagttcatatatcatagaggagataagtaataaaaatgtatattcatctaagtcattcctatagctttgagaaccctcccccaaacatatgactcagtcacactgtaagcacagaagaacagttgtcagtattttcatcaggaaatcaatgagataacctccttaacctagctcttagtgtttccacttcctagaaacagtaaatgaaaataatagtcagcatcacttctgtaggtgtgtctttttttccgtcatcaaaagaataacagacaaggattctggatgcattttgttcgtttttgctattgtttgttttcctttttagctattagtgttttatatgggaaaataaaatgggtgtaaaacacaaaagagtgtatgaggcaaaaataactatgtgatttggcaggatgtgtggcagggagaaatacatagatacatgggaaaattgcagataactagagcaacacaaaacagaattttcataaaaatctttctcaatcaaattttctgtcattcgttttaaaacaccacaaggagacatagtagaaaagacatatgccgatgcaattctgacttttttctcttcaaaacacatatgtaaaatttccaatgtcgttttctgttttaaatgccatttccttttgatgtcaaagtattaaaatcatttttagattttatgattgtcaaaaagctaccaaactgcattgaatttttcagatattcataaattaagacatacagacattagttctattgctgcagtctttatagcaatctagctacttattagataaacattaaatattagaaagactaatttatggagagagagagagagaagacagaagtaaagaaagaaaatataagaagaatggagggcttgttaagaataagagttaatgctggaagaagggagaagtgggaaattgaaatgggaataaaaatgatcaaaactcttcataaaaacatacaaaagtacaacataagtacaacattcagttggttgaatccatgacttatttcttgatattgttttttaagagtcatcatgattaaatagctctcatttttgtacgttcaactgggacaatcaacagtatgttgatgtctgtcttatatagcagtgtcttataaggcactgctaggcactgaggtcaggaggggacaatttggtctaggaaatttctgtcctagatccatacttcaaaatgatatcaatttggaatcaaaataattattataacaaagtcatgaaatatagtggctgctataattactattgttatttgtctgcttcaagcatggcatttcaggccaataaccaataaaggaagagatcagagcttgaggagcctttcattagaaaactgtgttcactatgctgaggaaagaaacggcattatttatttatgggtaactactaccaatgagaatatcacacacttggctgaaggtttcttttctgggtaaaaagagataactggtggcaaagtgtcatctgtcacacattctaaagacttcaactcctacagaacccactgatgtatccctggaggaactagagtgccccacctttgcctgccacgtatgtgctgggtagtcttcattaataaggagaaggaaatatggaaaactgttctctcccccttctgtaactgattgctcaccctgaaataggaagaggaaaagaaaagtgaacacatatgtgccataagaacactcttctgacttcctagagatacctgggtaacagggtatcattcatgccacattggacaatatggtacaacagcatctttctgcttttgtagtttaatggtctgaaatacccccggctatatgtttaatgccagacttccttaaattttatttctaatgaaaataaacctgactatattatggcatgtggattctgactagacctctggacaatagaagtaaatattcactagttggctacttcaactgacactttgaaaatagcattctgagaggctccttcagaaaatgttaccatatttttagaaggtaatttcattttttgctttttgcaattatatttaatcatccccccttcttccttcctccttacaaacccatattgccatattccctttctttcgacatagacagagagacagagactgagacagagacagagacagagacagagagactaacacacatatatatgcatatatatgtacatgatatgcatatgtgtgtgtgtgtatgagcaataaggtttgtatgaacatgtagactgataattatttccttcacagaagtctttggtcacacaggttgctgtttactggtatgtataattagataatatttacaagtactttcctaaggaaataattttcagcaattcagcaggacattcatcttgaaatggtttataaagaaaaggtggaggcgggggctttcacagtccattaactttaataaattcaacaaatatcatctcacctcatgaagagtcataaaaaatatccaacattctctgagctaccctggaggcataggatctgattatttagttcaatgatttcaaaacatacttgattacagaccactttttcatgccaatcttatttactccctttatggacaagtcctttggaggtcagaactcaattatgatgataaaaagaagttaagataagttcccaagtagccacaccttcaaatggaaaagagagtcaatattaggttacactagcttgaattcatgagaaaagagatgtaaaaggaattttaagaagtatcaattgttaaaattaaaaatagatgtgacaggatttaagagtggaaaatatgagacggttcccacagtttgatgaattatgcaagagtacaatgtctagctttaggaaggtggaagttatgaagcatagcttagtcaggctgaattcagtgaaatgacatcaaacttaattgcttctgggacaggcacaaacttgcttacagatgatcaatatggttttgtaaatatgattaataaacaaaacttctatccagcaaaaacattggcatgagaaagtatcattgtagactgccactttattttcacagctagtgttataactttacaaacaagatcacaatttctgttcatccccagtcaatacccagcataactccaatccaggatctccagagactgtgctaagacataaagggtcttatgttaaagagtcttccaaataaaattcagtctttactatgttctctggaagacttggggacccatcctctgattgcctctgaattcatttcctacttagctgatgctgtgactgccttcatcatataagctgaaatgttctactataccagatgaggtctctgcacttctttcactttccctggagtgtttttccagtgatgatgaagatggttttatacttcaagtaactcaggtcttcctcatgagtgaaggcatccctaaccttctctgtaccccactccttttctgtagtcaccattcgacacatcattcagcaatggctaatattgcttatgtgtctttgttcatctccttattctctccatgttaatggagcaatttaaatggtatataaattgtgaaatttaggctgcattttgttagaagagagttttcttatatggaatattgctgtcatgagggattaaggttgggtctgttctcatatattcatttagcagccacaagtaatgtcattaatttgtgcctttttagcttataccagcatcttcatattgaccacaggcaaaggaggaagcaaaatagggcaggtgggaaatattaagggagtctgctgtacaaatatcaaatgttacattcttccacaactctttggtcaaaatgcagttctatggacatattcttatagaaaacccctggtaatctacttcaactatcctttgagaaaaaagtcctagggtgaatttcactgggacttccaagcatgttctaggctctctgagtcatctaaggcaggaaaaggagcaggacgcataggagcaaaatggggaggagaagacaagaaagaaaagacggaaaatgaggagcaggagacagaaagaaaagaagatatagttggaacagagccaactaaattctgttcaatgcactctagtacaaaggaaaagatacatttcatggtagcaagaattttgtttgcactgctattgcatctcctcaaacaatatctatgtataacattccaacacagaatgtattgtgttgtatctatatatgtgtgtatacatattgatgtgagtttggtctaatgttacataaattatgttgatttggtccccaaattacacaaaaatacacaggtaagatgatgagggattctgtctgcacttggtattgattggttaataaatttgccagtggacaatagccaggcagggagatagaggcagaacatcagggttccagggaaagggtctgaggaagaaacagaaggagagagccatcatgctgggaaaggtgtagatgccaggcctgagatatgctgtactgagactttagctgtgatgtaggtgctggggaactcagtgtgagagagctgtaggtttgagtctgggtcagctaagatggcatatctgttattgtaagtaataactcagggatattgaaagggagagtgttagccacaaggaggtttgaaagtagcccagccattgagcttctaagtcatattaaagatataaagcctcatgcatgtgtctttcatttggaaactccgacctttgggatgagtaacaagaaaagtgctactaccactaaccagactatttgaatggagttatttcatttcagcaacaacagatatgtgctatataagaatgtatggtttatatatgtgtatatataaattagatagatagatagatagatagatagatagatagatagatagatagatagaaggatagataactcgtatatttaaagtcataaaattggatatgctacattcaacatgatgtatatgtgtgtgtgtctttttgtatatttaagtttacatgtgtctaaagtaaatataatagtctcatatttaattgaggcttaatcaaatcttttagacagtggtctaaatgcttaaattgaaatatttacaatataattacatattattagaagctccaatatcaatgttatattgttgtgatcagtggatcactgagataaacaatattcccaacttctcagggcttaggagaacagaggaaagatctcagtcacatgcatcatccatttcatggtgtcatatagtgccatcagatatatcctgcaacacaactgcatcagtaagaaaggtagaaggtaagatcatgcacttgcttcacaattgctctttaataaaatgttaagttacccttcctgaaggtgtgtgatcaagaacagactggcaagacaatcaaaaagaaatgctttccacggtcatcaggacaaaacctcaccaacacccatgctaactacagttctatagtgtttgcttttatattatacataaacatccatgctacacataaacaaacacaattaggtccattcaaagtcttattaaaattttgatttttattttctattgtttgcactattacactcagaatcatacttgcaggcccctttaataagcattttaccttctcttctacatcctaataaaatagggcttatgtatagggcttacagactgaagaagaaatgctaagcttaaattctaattcagatatctgtttgtgtgatgcaccttaaatgtcacccaccaaaccctccttctcagtataataaaaccatgtgtgaatgacacctttagtacagattcacagagcacacactacatattgacctgaaggctgcctttttaaaaatagctcccccacttagcacaagaagcaaatataattatgacacagggtaatatgtaaaacttctcaaattaataaggctctaaatatttgatatgtatttttaaaaaataatgtggaagttatttttgtaaaagaaaaaacattaaattgtgtcattattttaaaattatagtagtatctaatggtttataatctagcttaaaagaaagataaaggaagcagctatatatttcctaatatttcatgaataaatcaaatcctgattaacttaaaactgatattcaatcccagatgaacaaatcactgctttccattaagttttcttgtttaattattttgctttattttttcattgtgttactgtaaagctgacataatatctctctcatgttgagcaaatgggcgacttgtcattgtgcttaacccagagccatcctttctgtctatcttcctgtttgtgtctgttctttttattatttgtttgtttgtttttttctgcatactttctaaagatttgaaataaagcaatacattgggccacaaaatatatccctataatatcaattttttgaagattttgtatttgaaagaaaacacttttccttccaaatttcaggaaaaataaaaacaaaagatatagtaagtgtaaagactaatcttttggttatattactgagtaaatatggagtaatgacaaaggaatgaaaggaaggaggacaggagtgaagacgcagagaggggaaaaaggctcgtatagaatcttccaattacaatgcctcactgtctacccattagctgagtgagttcatacattcatctaatacttcagaaatctatttgatacattatttattaatattcttaagcttactttccatacactacaaaacaatgatgagtggacatacacaatggtagccaaatagccattcatacttgatgatgtgttattgtgacttataaatggctctttaaatgctctatgatttcttaccttgctttccttagctgaaacctcctgtcctcagcattttttttccattttttattaggtatttagctcatatacatttccaatgctataccaaaaagtcccccaaacccacccacccccactcccctacccacccactccccctttttggccctggcgttcccctgtactggggcatataaagtttgcctgtccaatgggcctctctttccagtgatggccgactaggccatcttttgatacatatgcagctagagtcaagagctccggggtactggttagttcataatgttgttccacctataggattgcagacccctttagctccttgggttctttctctagctcctccattggaagccctgtgatccatccattagctgactgtgagcatccacttctgtgtttgctaggccccggcatagtctcacaagagagagctacatctgggtcctttcaataaaatcttgctagtgtatgcaatggtgtcagcgtttggatgctgattatggggtggatccctggatatggcagggtctacatggtccatcctttcatctcagctccaaactttgtctctgtaactccttccatgggtgttttgttcccaattctaaggaggggcatagtgtccacacttcagacttcattcttcttgagtttcatgtgtttagcaaattgtatcttatatcttgggtatcctaggtttagggctaatatccacttatcagtgagtacatattgtgtgagttcctttgtgaatgtgttacctcactcaggatgatgccctccaggtacatccatttggctagaaatttcataaattcattctttttaatagctgagtagtactccattgtgtagatgtaccacattttctgtatccattcctctgttgaggggcatctgggttctttccagcttctggctattataaataaggctgctatgaacatagtggagcatgtgtccttcttaccagttggggcatcttctggatatatgcccaggagaggtattgctggatcctccggtagtactatgtccaattttctgaggaactgccagactaatttccagagtggttgtacaagcctgcaatcccaccaacaatggaggagtgttcctctttctccacatccacaccagcatctgctgtcacctgaatttttgatcttagccattctgactggtgtgaggtggaatctcaggtttgttttgatttgcatttccctgatgattaaggatgttgaacattttttcaggtgcttctctgccattcggtattcctcaggtgagaattctttgttcagttctgagccccattttttaatggggttatttgattttctgaagtccaccttcttgagttctttatatatgttggatattagtcccctatctaatttaggataggtaaagatcctttccaatctgttggtggcctttttgtcttattgatggtgtcttttgccttgcagaaactttggagtttcattaggtcccatttgtcgattctcgatcttacagtacaagccattgctgttctgttcaggaatttttcccctgtgcccatatcttcaaggcttttccccactttctcctctataagtttcagtgtctctggttttatgtgaagttccttgatccacttagattttaccttagtacaaggagataagtatggatcgattcgcattcttctacatgataacaaccagttgtgccagcaccaattgttgaaaatgctgtctttcttccactggatggttttagctcccttgtcgaagatcaagtgaccataggtgtgtgggttcatttctgggtcttcaattctattccattggtctacttgtctgtctctatgccagtaccatgcagtttttatcacaattgctctgtagtaaagctttaggtcaggcatggtgattccaccagaggttcttttatccttgagaagagtttttgccatcctaggttttttgctattccagatgaatttgcaaattgctccttctaattcattgaagaattgagttggaattttgatggggattgcattgaatctgtagattgcttttggcaagatagccatttttacaattttgatcctgccaatccatgagcatgggagatctttccatcttctgagatcttctttaatttctttcttcagagatttgaagtttttatcatacagatatttcacttccttagttagagtcacgccaagatattttatattatttgtgactattgagaaggttgttgtttccctaatttctttctcagcctgtttattctttgtatagagaaaggccattgacttgtttgagtttattttatatccagctacttcaccgaagctgtttatcaggtttaggagttctctggtagaatttttagggtcacatatatactatcatatcatctgcaaaaagtgatattttgacttcctcttttccaatttatatccccttgatctccttttgttgtcgaattgctctggctaatacttcaagtactatgttgaaaagatagggagaaagtgggcagccttgtctagtccctgattttaatagttatagatgtgtgctttccttcttagtgtactctgaaaccattattaaaagattcacaaaaaattgttatagctctgtccttgacagaaagcagatgttgccatagacacaggcttaagtttgtgaaactatataacagggttaaagatcttgagaagtatgattggtgcccatcagcataaaggggaatggatcttcaatgctcctgcccatactaagacccaccaagcacaaataacaggctaagcccattcatccctaattgacaaggacataaacaattttacattagttaaaaaagtttttttttattctaagtttattttctaattatatattctcatgattacagatgtatgtgtaattaaataccatgtttggacatataatggtaattctttataatgattatatttatatagtaaaattaaatgagaatacctttatatagggttgtattgtagcaagaaatggagtctataaacaactggttttatttctgttttaatgtagcatgctttgagcaccttttctgtctattgtgtttttaaatttttctttaattttttgagactataatataattgcataacttttgtcttttttttctctctccaaatcattccaaatatcctccttgttctgtttcaaaatcatgacctgtttttcttcagttgctgttttatagagattcacaagcacacacacacactcactcacacacattcataaaaacacacacttgtacacgcacacatttacacacacatacacacactaataaatgcataagtaagcattctcaggcttataatattacctatatgtacatttttcaggtctgaccatttaagatagtataactgattaatgtgctctcaaaagactatttcccctactctcagaaatcattggatgtctgtacttctttgtgtgtagttgcatcatcttgggctttcccattcactttgccatttctgctgttgtgttccttattcagccattcatgggcaatcatgttaatgagacctaatgggtatagcttctgacattcctaggagacatgttctcacacccaaatctatttttctgttaagatccaccactccaaattcattttgtcattagtatgggtcctcaagccctttattcatcatccagtaatccatagacgaataatgctaaagcataaacatcagaatctgtaaatagtcatgcgtggtaaatgtcattcccacttcctgttgaactaaaagttatttttaaatggggatattaggttaatgaaacacacctcttggtgaatctgcaaggtcatatgcacaagcaattagaacataagggcattgatttaatgaagtgtttgatggatttgatatctgaatacattattcagacttaaaggaactatgttagatgaagccaggttagagagaattttgttccttggaacatttccttagaagttgtatttttctgtggccgattactctgtctccaccatcctactttctgtccacgtgcctaagtcctccctttcatgatggagtgaaacctttcatactaagaaaaacaaaaatagtcttcctcaaaatgtttctggggggtcctatgatcacagaggaatgaatctaacacaatacttcagtttgaacacattgagagagagaaagggaacccttcatttgcttttctctctgtttgttttttttttttttatcatattatgtttgctcacatcagatgaataaaatgatacctattcttattagtaaggccatttcttctctcctcaatgtacatccacatcaacactaatgtcctttgaaaacagccttagaaacatccagaaataaaattttaatggttctaccagtactactaacccagatgacaggaaacatgagctattattctatttcaaattctagtatatgttataagcaactacagttcacatgtactcacaacacaaatatttcttctccattaagtctcatcaaacagctttaattgttggctcctgagacactgtgtcaagttagacaatatctatcaagtgtctgtgcagcctattttaaatccttcagtgataataaacacactatgttcaaatgcagtctgttctatccttggatagttctgagagctagaaatgtttctatgcagtactataattgcatttcctgtcgctgcttactttggtgcttgttctgtgccttaaagcacataaaagagttttaattacccaggaacaacgaggaaaccttgattcctgtccaggtccacaaatctgttctcttcaaatccaacacctcatatccttgcagtgtggtgggtgcgacatgtcttctggacacagcgctgccaagtttgctcttctcaccctgcttgctttaaccatatgcactggtatttctgctgcatgtctttttgcttttagtcacaaagtgttgagctctgttctcccatgacatcactgcatgactagtttgcccaagtaaaacaaggtttaattaaatcttaatgttgtgcccactctttccagagctaactgctattttcacttcccctgccattagcagaatacataatgagagagtgtggagcacagagtcagccccttgtacagagagtagcattttgtcactcactcacattctctcactgggcttacttttatgtctcactacaagcagcctggacgaagagattatgtgtgtgttttcttttaggatatgaagcagcacagtatgagaatattatttaggagtaagtaaggaaagcgttcagttaaaaacatgtctaagattgagcatgtaaatctgattttaatctcctgaacccactgaaaagaaaatatttaaatgcggaaggaaccatgtgtcttggtaaccaccaatgggaaagcagagatagatattaagatcaatggggctcactgcctagtcagccttaccaaatcagtgtgtgggcagctgagtgagagattctgtctcaagaatcaagataaagactgaatgaaggcgataccttacctctgcattcacatatacacaaacacacacagataagtaagtgtacaaccatccacacccacaatggcatagaaaaaataggggactaaaccacatgagaataagaaatggacaaaggtcgtattcagtccatcagctttgggagtttctacttccacctgctgtctggttgctttttttccatgcgtacaaactgttcaaatgaaaatctttactcttctatgcaaataacctataaaatattgtctatttaccctgacataagttcttcattgcttttgatttttaatgtctggcaaagcaaaccaactaccaacaacaaaattacataattataccaccaaggtaaccttggggtaactaattttccaatagggtcataaatcttcaagagtgatttaaaaattggtgatcccataagactagtataacatctgaccaccatttccctacaaaaatatactacaacctatgaaaccataggttgacatattcacgcagattggtaacaaattcagctgtcttccaaccaaagacaaatgtgaaagttactaatttacaaagtgtggatttataacactagctcaatgaacagccaaacctatatattactttacatgttaatattggctattatgttatttaactctccttatttccctgataagtaagaattgttgagagtgactacatagacctaactccatttcagataaacaaaacaaaacaggtacaaaatttgtccattcaaaggtaacagaccatgatagtataaaataaaatatttagttgcaaatgtctctattttcaattttcctaatcaaatggaatcattttatcatgtatatggagagcgttcagtttgtgtagtttttgtctaccaaatgagtgagttttcaagctcattagcatgtgtaaagatggtcacatcagtttacataatgattagttctgttgttttactcaaaataaagcacccacaattacaatttgaaaacagaataattcttaaaaaaatttaaaagtgttgaattctttatagatcaaacatgaaagtgattaacttattttcttcatctttagtgaagcggttccagatttgatgcatagtgtagagaagtattttttttcagttgatattgaatatattaaataattaggaaatgcacaaataaagagtataggagattcaccacggaaacctagctcagtgtatggataaatcttagcacatgttaattgagtgagtggctgatttaaggacttgttcaaccgaactctcagtattcaagtctaggacattttactattcttcaatttttaacatacatcataatttctatgattctaataactaatagaggtccctttccaggtctttcattttctgggctacaactacgtagctcaatgaatttgaagcaaatttcagacactgatatctctcatttggatcttcacatgtgttcatgaaaaatgaccactctatgcagtccagtcactttacatgaccccacaggcagaggttacaatacagtcatgagcagcctctgatggaaatgatgctgacacagcagctttctgaaaggctctgtagtgtagtcaataaaaggctcacatttcttctgatgccatttctaaagctgctccttggcaacaacagtgagcctctatttggagacacaggtacctctaccctctacactcagcatagaatttttgccacaatagcctctggcttcaaaatcttttattattattattattattattattattattattattattattatctttaatctctttttatagtccagtcattatccccctcctgttccgccctctgacatttcctcttggcattccccatcccttgtctccaagaagatgtccccaatccccagactcctcccacaccattccctgattcccaagtctctcaagggttaggtgcatcttccctcattaaggtcagatcagagaatcctctaatgtatgtgtcaagggtcttggaccagctaatatatgctgcctggttggtggctcggtgtctgagagatctcaaggttccagggttgttgaaactgctagtcttcctatgaggttgccctcctcctcaactccttccatcctttccctaattcaaccacagggattcccaacttcagacctaaatactaaaatactttttttattagatattttctttatttacatttcaaatgctaacccctttccacatttcctctctgaaaatcccctctcctctcctccctctccctgcttctgaacccacccactcctgcttcctggtcctgtcatttcccattttctatggggcatagaatcttcacaagaccaagggcctctcctcttattgatggcctactaagccatcttttgctacatatgcagctagagacacgagtcccaccatgtgtttattttaattggcagtttagtcccagggagctctgggggtactggttagttcatattgttgttcctcctatagggctgcagaccccttcatctccttgggtactttctctagctccatacttcttatatagtcatgcttgtaactgtattcaagtacaaaacttttgtacaatctatgctcagcatgcaatggcattccatgagttctcctgaggcagactgcacacttagagttgtttcatgtacttgtgatttttctctaatcaatgaatgtagaatcactaatagatcacacttgaggtgccacatacagcttaatgattactttgggcctgtgatgtccttaagttgtatcactatataaactgtgtcacagttctaaccaaattagttcacttacactgagtactggtaatgtcagtgaaaaacttatttctaacatttgaagtggcaataaatgacacattcagctgatttttaaaaagccatgtttgatcctaatgaacatcattactttagtgaccagcaattctcaaattaaaataaattagtcactatttctcaaatgtggcttttcaaatagcctaatacatgttcatttaaccgatcattacctgataccggatctcttctttctcggggtaaaattgaaactagtgggattcttataatctatcttttatattgaataagcttcaagttgaatatattttaaagccaaggtcagttctagaattctacactgttgttcactctgtctgggaaacagtgcatcttaatttttttttttttacaagcttgaatggtttcaaatttagatagagtcacaaattcttgccaatcagtgtatcataaaaagaaaatgtcaagctttgaatctaaagagttgtatttcattgtaggattcattcacttcagggttaaaaaaaatgtccaaacacacaatgcttactagaatattaaccaatcaatttccaaatatttttgttactgttttatagagcttttcttactcaatagttcctcctcatgtattattaaaattagatttctggtagggaccatgcctttgttaataatcttgctatcataggatctagtactcttcttgaacatattaggtgtttgtcttagtcagggtttcgattcctggacaaaacatcatgaccacgaagcaaattggggaggaaagggtttaatcagcttacacttccatactgctgttcatcaccaaggaagtcaggactggaactcaagcaggtcagaaaacaggaactgatgcagaggccgtggaacaatgttcattactggcttgcttcacctggcttgctcagcctgatctattatagaagccaagactaccagcccagagatggcaccacccacaaggggacccccaacttgatcactaattgagaaaatgccttacagctggatttcatggaggcatttccccaactgaagctcctttctctatgataactccagcctgtgttaagttgacacaaaactagccagtacaattgaccacttgtcaacttgaaacacatcactagtaaacctcaacccttagcttcttattcatccccaatatctaaacaactttaaatatcccacagtctttacatattaaaagttcaatccttttaaattatccactatcttttaaaatccaaagtctttttacaattaaaagtctcttaactgtaggatccactaaaatattttcttccttcaagagggaaaaatatcagagcacactcacaatcaaaagcaaaaattaaactccaactgtccaatgtctgggatccaactcatgatcttctgggctcctccaagggcttaggtcacttctccagccctgtcctgtgtagcacacagcttttcctctaggctccagatgcctgtactccactgctgctactgttcttgatggtactgttctcatggtactggcatctccaaaatgctgttgtcttccactgtaacttggcttcaacaatagcctctcataggctttcttcatggtgccaagccttacctcctttgcatgaccccttaaatcctgggcaatcaattgcaactgaggctgcaccttaaccaatggccttgcatgacttctcacagtgccgcgcctcagctcttctgtcggacccttcatgccttcaaaaccagtactacctgggtaactcttacacattactaagtccagccacagcacaaggtaaaaccttggctatctctggaacacagcatctgtgctctcaggaaacacttcccagaagatgtcacctcaatgatgctggtctcttcttaatcactgctaatttcttggctccagcaaaccagcatcaatagccccagtaaggaaagttttcactatagtagttctggaatcttgttgatcacagctgactcttcagcaccagctaaccagaaccacaaaatcttcacaatcaaaatagcaatggccctgaaaagagtctttaatcttccctctgaaatttcagaagtcaggcctccttctgcactgttctcaatattatcttcaaggctcttatacaacatcccacagagctcttaacactgaatggatcttctatcccaaagttccaaagtccttcctcagtcctccccaaaacatggtcaggttgtcacaggaataccccacttctggcaccaatttgtcttagtcagggtttctattcctagagaaaacatcatgaccacgaagcatgttgaggaggaaaggatttattcagcttatacttccatactgctgttcatcaccaaggaagtcaggactggaactcaagcaaatcataatgcagaagctgatgcagaggccatggagcaatgatcattactggcttgcttcccctggtttgctcagcctgatctattatagaacccaagactaccagcccagaaatggcaccactcacaagggggacccccaacttgatcactaattgagaaaatgccttacagctggatctcatggaggcatttccccaactgaagctcctttctctatgataactcgagcctgtgttaagttgacacaaaactagccagtgcagtgttcttgtacagcttttaaaaagtataagtgagagttgtaaagttcagataatatatggtcagctcacatatcccctttttttccacatgaaaagaaaagccatgagtgttgggatcatttaagtctaacattatccattttctgtctgtctgtctgtctgtctgtatttttgtatgtgtttttaatctgacatgtaagggtccactttatcatctaacaatgtaataaagaaagacatgctcactttttatccattcactgcactatatcaggataaatacttcttaaatatgactgacttaaagcccaccaataattctgcacctgtttaattttaaggaaagcatccaaaattcttagcatattaaattgtttgtattaattaacccctaaccaattatgtatactaatttgatatttcatatatacatatatacacacacacatatatatacacaagatatattaatattatatatactccctatatgtattgtgtgtgtatttaaatttgtgtgtgtgtgtgtgtgtgtgtgtatgtgtttaacttatctcaaaatcatcattctgcattccagttcactgaagagattgtataagattctctcagacagtctttcctgactttgatacctgcttttccttatttgactaattttaatttgtattttaaggcagcactcactgtgacatctttaatcataaactgtttcatactattctgattctgtgtatgagaacatagaatagaaaatgagtttctggaagaagaatgtgtgaagatttaaagcagcctgctgtacagagtagggtctccagaaataactaatgaatagctataacttcatgaagaacttataaactatcctgctaaaggaatttccattcttgacaattatctacagaaaaatgccattgctgaacacattttacattcttcatggtaaagaaataattgtttcactgttgatgtcaatatacaccttcaaccacctaaaaattatctggcactagaaatacatgagtactggaatctgatgatgagactagagtgtgagtcaacagaccacattccaagttggcaataacagaacccaagcatccaaagctcataattcaagttgagcttctcattaatctaaatgttaatgtaaacataaaatgtggcatattgatttggaactcttttatatgaatattgtataactgagctctctaacagaagaatccaaatggacatctcttcacaccaattgatttcaatcaagtgaaaatttgactaacttttattctttttctttcattgttttttttaattttgatttgctttgtgtatgtgtgtatgcacacccacacacacacacacacacacacacacacttgcacacacccacacacacacacacgcacacacacaacacacacacacacacacatacaccatttgcttcactacaaaatcatcgcaatacagttccctaaacaagacctgcacaatggcatggcaacatgaatgggggaaatttataagacccggccccatgtgaaacattaagacaattgatggctgctgagggaggagggaggagccttctgataagttgtactcatatcatatgtagacaaataagtataagtggattcctgtgtgattgtgtgtgtgtatgtgactgtgtatgtgactgtgtgtgtgtgtgtgtgtgtgtgagagagagagagagagagagagagagagagagagagagaggtaacaacaataagcaaggaagaagtcataaatttgagaattaacacaggagcataagaggtattgtagggggagtggaaggaatgaaaatgatgtcagtacagtactcatacacgagatgcttaaaaataaaataagctgaaagtgtctttgcaaaatgagaacagtaaccttggatagttttgagcacatcagtttcttaatctgttctttacaaatactgaatggagagtttagtagtttgctttttccttgtttttctgaggaaggaaaaaaattagagtatcaagactgattagttgagtactgtgtggttgataaaaattgactgaattttctcctattgggttatatttttatattaatattaagttgtttatatatgcttattaaacacatatacacaagcatgtgtataatggaaaatgaaatttgcaaaagacattatattaggtcaaccacaaataagtcatagagatgattatgatgattatggtgtagacaataatgttatctgtaaactctttccagatactaattcacccaaggaactttataaaattgtcgtagtttgattcctgcaacagcaggggaaggaattgtcacttttgggattataagttaagataaatagggaaaatattcctaaccccttctcaaattctgaagcaactgtgttgaggccaatgaaatcgaatatagggaccactagaaggtgagtcagtgagtgtggccaggggaagtcatccaacctcgaactgccaggatgcaagaaatatgaagtagaggcacatgcgctgggcagtcattcccatctgccagctatgctgcttttctcatgcttagaaactaaactaaacatctatggcttggtgtcttaatcatcaaaagagaaaacacggttcatgtttttggttttttcccagaatagttaggatgcttaatttttaagtactgtggacagtttagttcagagtctgaggcataaaacacattgacatttcccttctttctttcagcaatggcaggaaataaatatgatcagtcagtataaaaattctccttgggaataatgatttcagcaaacattcggttcttaaatgtaggaaacaattctgtttgggaaagacaaagacatgaaataccaattagatatgcatctttgatcagaactgattttccttgtttggagatagaaacaacaaaaaaaaaaaaatccaaaaccaaaccaaatctagccaaaacaaatgaacaaacacatgccacccctgtaagctattttgtgatgctctctcaatatttttctgatctcttcagagttcaaacctttgtcgctcataagcacagcaagacagctgcactaccaactaccagttgcaacaaaattattttgattttctgatttaaaaaaaaatgctaaatttcaacaagcagacttttgaggttgttgttgtttgtttgtttgtttgtttttccaaattggtttgtgaaccccaggtcaattgattagagccaccttggtactatttgtctgtaattaattgtatatagacagggaagctggaagatgtttgttcatagtttataaaaatgccctcatgcaaacatgagtgttttgccccaaattattactgtaacaaataatgatttttaaaggaaaatgagagaacttgagagaaggccacaattcagtctttttttttttgtcttgagattgtgttttatgtgcacaagaatgacctccaactttctatatgcccaaaggtgaccttgaactattgatcctcctgtttgcatctactgaatactaagacgacaagtataccctacttcaactaggttatgacattctaggaatcaaacccagtgcttcatgcatgataggaaagactcttaacaattgagctacacctctgggtatttaaaatattttttaatttaaaaaaaaaaacaacataatttgggttggggagcagggagggggaaaggtataggagattttcatgatagcatttgaaatgtaaattaagaaaatatctaataaaaaattaaatactctctgaaaaaaagaacaaccaaataaataaataaataaataaataaatgcatcagttctctcttttctttctttcttcctactcctccaaagtctaaagccccttccctcctaaaattgtgctctcttcttctctagcaattatacatacatacatatgtacatacatacatacacacacacatacacacacagacatacacacacacacatacacacacacatacacacacacatacacacacacatacacacacacacacatacacacacatacatacacacacacatacacacacacacacatacatacacacacacacacacatatacacatacacacacacacatacacacactcacacacacacacacacacacacacacacacacattcacacacacaactacatcctgctaagtctgtactgtgttgactgggtatataattttctaggactgactacttcactgattttggataaccaatgagaagacccatcactggagaagacaaaactttcactcccacagcaactgttacttgaatgtagcttatcatctagggttgatggcccataaagtttcttttaactactctgggatatttgttgtaattatttaagaattgtttgtgcaaccagatggttgtggctttgctgtcatggctggaaggcacacggttagagcagatttccagttcttctggcttttaaatacgccaggtctctcactggagatgttccttgaaactcagataaaggagttatgttggagatgtatccatgtgaatggactcccttgtctgtttttaattgcatttgactatgtgctgttttctatgtcatcattcagttggggaaaaaaaagagatgctcccttgataagtggtcagatctatacttacctatagtattataataattatttagagtattgttaggaattatactgctctaggaaagtagaggttgcaggctctcctctaaaatccatggacatagtaacacttttacacaatattcttcctgcttgaaggagagaactttaagattcagtgaagtttgggacttgcttcaaaattgcttactaactattgtatggaaaattgtatccagtcagaatgtttacttaaatatttttctttgcctatatttttatttctatattagactgatatattacaattacagtggagacttctggtactttttaacatactaacttgtatattttcataggaaaacatattgggaattgaacctgagtcttcatgtgtactaaccaagcactcaaccaccaaactacagtctcagtcctgattttctaatgttttaagtgtgtttagctattagagttacaacaatttattaactgcagttaaagtcaaaagaaaagaaaaaaaagcctctcatattttgcaaaactgttatttatacaatgtttccccaatagcattcatataatatacattcaagaataaaaaacactgaaatttgacagagaaatgaaaaactaatgaaatcaaggatgactaaacttgagcagagaagcatgcataaatatgtgtaacaggataattacatggacatgtatgaggagttgccttattttaccaatatttaaattaactagtcatgccgggcttggtggggcacacctttaatcccagcacttgggaggcagaggcaggtggatttctgagttcgaggccagcctggtctacaaagtgagttccaggacagccagggctatacagagaaatcctgtctcgaaaaaaaaaaatgactagtcacacagtagtgaacaatgtatgttctgagatttccagttttagaactctactatgaacgtgaaataagcaggcatatcagaccctagatgtgtcctcattcatatgttgtaatttaaaattgatctctgtattgttctctccaggtgtgaagaaacatcaccagtagagatccaggacacgtgttttacttctttgaattctctcaggaagagaagagccagaaagacccacattaaggtatgctcaattcacttgttatccatcttaggacttacataattgctgtatatgttagggagaggatgaggttgaatatttgtaaagaacacacaaatagagaaccagtaagagtttgtaacaaagacagactttctcacatttagtaccatctttaggtagacttgcttaccagggttatattactctttgtcatcaaagattaatggagggatctggcacaaagaacagagacatgattctaccacggttttcaccacttcctacaatattaagataatttgagttgagggggggggagttatagaaagagccagggcactgagatgcttcctcatttaggaaagatgttacatattcgcccatattttaatcggcttccttctagatgtgatgttttttcagtaccaccaaaagctctctctgttgctgtgcggctgctgctgatggcagcacagcaaaccacaaccatttgttgtcgtatccatattttaaatgtaaaaggccggtggaagaaattttttcgattgtcataatatactattcaattattagtcaaagcatttgtgaaggaaacggtttataaatatcataagtgaccttagccaatgccttaatataccagtttcaatggggatttgtatctaagaaaacgaatataattaagatagtgagaaagagtaataactttaaaacaaagcaaagtaactgtgtggatctaggactataaacaaaggaaaggatttagagcatgtgccaggacccactgcatactgaccaggcatttgtcagtaagtttgtggttttcaaacttcctaatgctataactctttagtagagttccttgtaatgtggtgatccccaatcataaaattaatttttgctacttcataattgaaatttttcttttgcattgagtcataatttaaatatcggatacatggggtatctgatatgtgaaccccaaggggtcaagaccaacagattgtgaaacactgctctcagaccaacaggacttatttatttcatacttttttctttagttgaggctcaaaaacattccattaaaagtaacttcactgtggtcatttgatagaattaaattttgggttatattcttacctgggctaaaatattagaagaaaaaatctaagagatttgaccatttggcattttattacagaagaataaatatttaatatactactccactgtagaatatcatgagtgataattaatcatcagaatcagataagtctactttcacgatatggaatctgtatttaatacaatttttgcttcatacagtttagtatgtgtagtatattacatgtaaacatgtagcaaatgcatgtttaacatgaaaaatataagttgtttgccaaaagtgggatttataaggtcatttggaaatttgattattagcaaagtatttttagttatctttcaagaatatcaaatggtttataagttaatcggaattttatttttcacactcaaacatacaaatctgaaaatgattctataaacttatgatatgattaaatctataaaagtcatcacctaccaaacttttatattcactgaaggagcagagactgctaaatgtctttgaagaatagtgaccatcgggaaggagaggatcttttatagatttaagtatatcataagtatatagaatcatttttagatttatatatttggttgtgaaaattaaagttctggttagcttatgaaccacttgatattcttgaaagatatctaaaaataatactcagctattaaaaacaatgaaatttgtaggcaaatggatggaattagaaaatatcatcctgggtgaggtttaaaaaaaaaaaacacacacacacagtgtgcattcactcataaatggatattagcccaaaaaaatcagaacacccaaggtacaattcacagaccagaggatgctcgagacaaaggaagacctaagtgtggatgattcagtcctttttagaagggggagcaaaatactcatgggaagaaattcagagacaaagtgtggcacaaagactaaaggaaaggccatccagagattgccccacctggggatccatctcatatagaaacaccaaacctagatactattgcagatgccaagaaatacttgctgacaggaggctgatatagctgtcttctaagaggatgttccagagactgacaaatacagaggtggatgctcacaactaaacattggactgagcacaggattcccagagtaggagttagataaaatactgaaggagctgaagaagttttcaacttatagggagaacaacaatatcaaccaacaagaccttccccgtactccccagagctcccagggacatggaggtacccatggctccagccgaatattcagcagaggttagccttgttgtacatcaatgggagaaaaggcccttggtcctgtgatggttaggggaatgtaattcccagtgtagggaaatgccatggcagggacatgggagtgggtgggtggataggggagcaccatcaaagaagcaggaagagggagggtgggatagggggttctagaggggaaactgtgaatggggataacatttaaaatgtaaataaataaagtattcaattttaaaaagtaaaagttttctttcaaaaaaacaaaatgaacaaaaacaaacaaacaacccccccaaaattgccaaaaatagaaaagcctgctttctcatcttcagtcaattcaagtacaaagcagaaatactttccatttaaaatgcatcaaaatatttatcaaaaaggcaccattttatagtaattcttcttagttactgttttacggctataaataaacatcataaccaacccagcttataaagcaaagcattcgattagggccttacttacagtttcagaggcttcgtcgatgactatcatggtggaaatcgtggtggcaggcagccaggcatgttgttgaagcagttactaagagtttacatcttacctacacgcagtgggtaagatggatgtttgaaaccacaaagtccattctgtgggccacaccttctcctacaaggtagtactttttaagccttcctaaatagtacaccaaacaaatatttaaatatttgaaccaatggggaccattttcacactaccacatttcactttctgggccccatagattttcagccctatcataatgcaaaatgcatacagtacaacctcaaagatccacatattcattcacaatcacaagactatgaaaaagtctaaagtccaaaatcttttatgagaaccaaggaaatcacttaaatgtaaccccatataaaagcaaaaagaaaattatatatttccaacataaaattgtgcagaatatacataaaaattccaaaagggaggaaatggcaagccgtgagaaaatactagaccaaattaacgctgaaatccagcagggcaaattcctaatcctgtacatccatgtctggggctatgtggctcttcagatctcccaccccttccagctttgttgaatgcagcacaatgctttctcttgacctggtgccagaccttgtctggaactcttcttggcaggaatccacagctctggccccttcaacttcttcaggtctccaacacaatataggctttaccttcacagcttcaggcaacagcctctcaggacctccctgcagaaagtcaccggccatatgtgtagcctcagcagtttttcttaacctttaaggaagattttccaacccctttacacctgtatcttttgaacaaagcctggagtacttggctaaagctgccaaattctgctgacttctagggctggaaactggtccttttcaagacatacattcatataagctttgaattgttaatagtttcttttgttgaataacctttaattttcacatgttggaagcttagctgaatgggttcttgccctgatgccacctcttctttcattccattccttctaaagcctttgcttaaacttctcatctcttgagcataggacatggctccaacattaaacatttcccagttctctttttcctcctcaaactgtacactttgtaatgctttagccctgcttgctcttttttattgtagagctgcaacaacgtgataactaatagccatgtgacacagtcaactctaggctgtctttaattaaaaagattttcaaattagtctcatgcagaattttcagacaagagaagaaagcagtcacattatttggcaaaatattacaagaatggtctctaggccaactggcaacatccttcccatctgaaacctcttcatcttggtctctatagtccacattgttctcagaattactgtcttccaggtatctactagaaatgccccaaaacaccaatgacaacactcaatctcctttctaatacaaagtctataaatgaggactcagtgaaaccaccaaacgaaaccactccatggctagaaaaataaaggttaactaaggttcaatcttcaatcttcgtctctcagtgaaagcagagagaagggcaaaagggaagtattgcaagcagatttcacatcatcagggtggggtccttcagctaataaatggtgttcagattgtgtgggaactagttgcccttgaccatggttgtagaccactggggaagataaagggtggtttttggttatcaaaacccctccttagatctgctttcctggtaaattgaaatgaacctgtgaagaaccttgatgttagtctcctctgaaaagatacaaacattattctacaggtaggactccaatcttaagatgcaagtgtttctttcttttttttttaaattgggtatttatttcatttacatttccaatgctatcccaaaagtcccccacaagctcccccacctactcccctacccacctacttccacttcttggccctggcgttttcctgtaccaagacatatagagtttgcacgaccaatgggcctctctttccactgatggccgactaggccatcctcggcttcatatgcagctagagacacgagctctggggggcggggggggggagggtactggttggttcatattgttgttccacctataggattgcagatcccttcagctccttgtgtactttctctagctcctccattgggggccctgtgatccatccaatagctgattgtgagcatccacttctgtgtttgccaggccccagcatagtctcgcaagagacagccatatcaagtgtttctttaaattaagtaaaagcagaactgtgctaattgttaaaatttcataactacagctaaatagtttctttaattaatagaataattattgatatgtatgtatggccattgaatttgaaatgaatctactttcttatttacctttatagtttgagagccttttgtgtacatgtggcatatgtgtttatatgtgtcaaggtgggtatctgtacatgtatgatcatgcaattggaagtcacaagtccacatagtttgtcttcctcaatcactctttattttattttaagacagtgtctcttcctgaaacttggtctaatgtttcagctagactgtctggaagtcttctctagtgatccatttgtttttttcttggaggatgctaggaaattaacttacagttacagatttttaccaacagtttccacttcctgctcctgtgtgatagccaatacaatatcattttaggttattataaaaatgaaataacaatttattgcatagaaaattaaatgaatactgaatttatttctaggagatgtattctaaataatatagtaagttcaaaaatattcaacttctggacactaataaatcacaacaacaaaatcacatgatgggagaacacgctaacttttattttccttaaaatatataatatttctgattaaatttagaattactttgtgaaataaaagcaaaacagtttctatagtacagtttgaatatttacagaaaatttcaaggatgttttgctaaaacatcattaaaaatcaaaggacattactataatatagccccttacttgaacaagtgacattactctttctcgtctgctatcaacaggcatcagcctgcagtttcgttacctatggacatctgtccagtaggagtcaggcctatcaacactgccacctattcttctttctgatagaaggactgaagattattgtgttctgaaaagttgttaattggacagggcaacagattgaaacctggtatgttccaaatagcagagtccggttcctggtttccatgcataaagcagtcgtgtacatgggtaatgggaaaatttattaactgttacttaaatggagttctgtttaatttttgtgaatatacatatttatatgtatgtatgtatatatgtgtgtacacacatgtatatatatgtatatatatactattattacaacgatgggatttttttcaatacaaaatttatagtttcttttccctagtctgggttgtctctgaactgtggctgtactgatacgggctgaactgttactacaaccgattcatagagttcttggttaataaaacaaacatgcccacactcccgtgactctgatcgtggttagcaaaccattccccataagtctaatatgggcctacactgggaaattttctgtccttttgtatcccctcttcttgctatttaaataatatgctaaattcaaacacccagtggtagtaagagaacactttcataaaataaaaagtagatcaatggacctacatgtgaaaatggatatgtgtgtagatagagaggcattggattgcattgaaagtagttacaatatgttacaagaattcattttaaaatatagaacattttatgatactatatatgtacataataaacattgaaataatatttctaattgttctattactttggatatatacagaagattagatttaaataaatattcatttcaaaatactgatacaaaaatgagtaatatcaacaatttcatacatatttgaaaattatgtataacatgaatatacaattttatatatccataattctattatatatttcttttaagctttctattaaaaaatagagattaaataaacttataggtatatagatgggaaataggatatagcaaggtaagaaaatgatttcttactgatatatttgcacatgtctatgtgtgtctcaaaaacccgtgcaaggcccaggcctgttctctctttatcaccaaatgagaatgtgcttcttggctgcttctaccatgctgtatttccatgttctccacaattatgataataaacaacctttgaaaatttaagcaattccccctaataaaatgttttcctttataagaatggctttggtcataatgacttgtctcttcaatagagcagtgactaagacaaggagaaaagacaacaatgatcttacacaggaccagaccctgcattctacaatagcaacttgccacacaagaagcgaaactcccttaattgaattgtaggccttccaaacagaaggaaaccatctttagtacagtaaatatgcctagtacagagtctatgcctaggaagatcatgagtcatggggagaaccaactgttgctttactcagatctttgtaatgcagattattcccaccacagacatgtgaaattatgaaattttcctggaaaagatttgttccatgactcccagagttggcccacaactgtcataataatttctgctcctttacatcaatcatagaaatgtgtgcttcaacatctacaaactacacaaagacacagagacaaataacacaaataaaccctttggataaattgcagacaatattaagcaaaaagaatctgtgtaacttccaaggcttgggcctgaaaataacctttcaggatgatagagaaggaagagataatctctgtattcttcagcatagtgacagttttggagtggtaaacattgggtcaaagtgagagatgtggatgagtaacagaaaccagttaaagtaattgtatatcaattgtgcaagactttatctatcatatacaaaggggaagatagttgttcactgaatatgctattgcattagtgggaaaactttggttacagttataattataatttaaagactgaaaacaagtaaattcctttagtgtgccattttatatagatactgacactgtcccatttttaagaatattaaatatgccaccactgtctatcaagcttttctaaggtatggaaggagtcctttgatacataagacaaagatgtgacctgtgtcttcctctctatttcctaacaatgtttcattttacagttttgtgtgtgtctatgcagggtcatgagacgttaataatcccttttggaagttttaaatgaaccttctgttcacaaaatccatttactctaatcacttgttattgcgattgtatggaaacaatggcagactgtagcaacagtgaagtccttcctatgcatatgactgaaatttgacttctttaactgaattccactattgaacaattgtttccttttcacccgaatttcaaggttaaagaccttgaaagatagtagttgatgcagtcattcaaattgagtcaaatcagatcaaaatatgtgcaaagcaattcaaattctctgaagttttggctgctttggcttatatggagggtgtttacagtaagggtttacatttcatattaatgggaagagtttattgctttttgcttatgtagttttatactgtttttctttattttgccttttacaactaatatagcttaggctagtcttattagacagctgagataatcttgagctgctaatcttccagcttctacacccaaagcaagaataaaaggtgtatatcattatgcccagcttgtattagagtaatataacaataataattcaaaatggtgatataagttgcagcaagggaggtatctcatatgactcagaatatcagcctttttgtgtgcttttattcactttacatcccaattgcagctgcagttcctcttgtcctcccagtctgatgcttgcaaatcactccccttactacccactcctttgttcctcagagaaggcaaacatcgccttacgtatcactccaccctggcatatctagtctcagtaggcctaagcacacatcctctctcactcagtatttttttagaactaaatagggaggttggaaagttaggatcccttgtccaattctcttcctttgcctatagcacaagaagcataactgagataaagaagagataaatgaattcaatggctttgaaaaggaatgccatacaaaagaatacagcattattttgtaggaaaaaacaatctcacttcacatgtgctgtgtttggaacggtagccgctgggaaagctgaggtgaggagaaaatcacctgctaaggctcagtcactccacatcgcgtttcagctgagagtgcttaaaaacaatacacttgaggaagcaagctatttgcagttatgtttatacatgatcctatttactctatctgtgaggggagattttccgtcagagttgtcattgttgtcattaagcacccactcattcattcaatgcatgtttattgaacattaggccacagcattagacacgggggttacggagtaaataaatgtccttttctgtgaaaggaagcaagaacagaccctgggaatgtaacatcttaatggtagatggtagaaacgggctgagcagatgtacattaacataaagatatatacgcttgcccacatatacacatatgctatcttgccacactgagggagagaaatatcaatcacactgtagatattaacagaatgtctgggtggcttccgtcttcatcgcagaaaattttatggatgagttgagttttgaaaactttggaaaaaaatgtcaggataaaatatggtggtgtagaatacggagacttttactgtttttgtgcagagagagctctctgaagacccaagagatgactccgttgcgtggagaactatcatttgaatcagcaatcagctcaggtgaagcattctttggatgatcaaatcagaactaagtctttgcattacagaatgtttctagaagaaatatcagtacaagaattgcacattaggacttcaagtctttggctctgagttcatacataataattatgacaaatggaaacaaacctaagctgttgaacacactggtgaaatttctgagctctgtgaattattttttattattactgtatgtgtaaggcatgtatgaatatgcatatgtgggatattaaatccattcaagagtattcgatgaccagtgctttgattgttcctctatggttctttaatttttaagacagggactcacactgaacttacaaccccatttcctctgcctagaattactagacagcacacctcagggatgcatctatatccatgccatcccactccctctcatcctcctgcccagtgctattaataaggcccatactatcttacattattgctattaccaatatgagcatagggtctcatggttgtgtgccaaacactttagtcattgagctatattcacaacacaaataaatacatcaatgaaccatgtggatgggaatactttacaaaatcccaccactagatggagaattataggccatcaaaggctactgagacagggaaaaacagattcctccaaagacaagtccctgatagccactcccaaatttcggacataacacacacacacacacacacacacacacacacacacacacacacacacaccagttcaagtagtcaattgcttttatatctatgtttgactctttatctgtctatatatgtgtgtgtgtgtatacatatatatgtgtgtgtgtatatatatatatatatatttacatatatatatatatatatgtgtgtgtgtgtgtgtgtgtgtgtgtctgtgtgtgtgtgtatgttcacatataataataattaaaaagaggtcataaatttttgagggaaaggggatgtaattaaaagaaaaaggtaggaagaaagaagtggaaatgatgtaaatccagaactcttgtatataaatttttttattacttttagttttttacaatccagccattaccctctccccagtctgccctcccacagttactcatccccccagtctgtcctcccacagttactcatctccccagtatgccctcccacagttactcattcccccagtctgccctcccacagttactcatcccattcctcatcactcctgtctccaggaggatgccactccccacaagatcttcccactccctggggcctcaagtctcttgagacaaaagagcatcttctcacactgagacaaacccaggcagtccaccactgcatatgtgttgggggccttggaccaactcctttattttggctggttgatgagtcagtatcagagacctcaagggtgaaggtgagttgagactgctggtcttcctatgggcttgacctccttcacagcctcttcctgcatttccctaattcaattataggggtccccagctccagtccaatggtttggtgtaagtatatgcatctgtctcagtcatctgcttgttgagcctctcagaggccagccatgcttggtgcctgtctgtaagcacaccatagcagcagtaataaggtcggactttggagcctccccttgagatgaatcccaagatgagccagtcactggaccaccttttcctcagtctcttctctatttttgtcactgtagttatttcagactggaacaattctgggccagaatttttgactgttggatgataaccccatgcctcaacttgatgtcctgtctttctactggaggtagactctacaagttccctgtattagtcagggttctctagagtcacagaacttatggatagtctctagatagtaaaggaatttattgatgacttacagtcggcagcccaaatcccaacaattgttcagtcacagctgtgaatggaagtccaaggatctagcagttacttagtctcacacagcaagcaagcgaaggagcaagagctagagctagactcccttcttccaatgtccttatattgtctccaggagaaggtgtagcccagattaaaggtgtgttccaccacacctttaatcccagatgaaagatgtagcgcagattaaaagtgtgttccttaaactcggagattcaatcttctggaatccatagccactatggctcaagatctccataccaagatccagataaggatctccaagcctccagataagggtcactggtgagccttccaattctggattgtagttcattccaaatatagtcatgttgacaaccaggaatagccactacattccctcttcccactctttggcatttcatccatggtccctccctttgagtcctgagagtctcacacttcccaggtctctggtacttttagagggttctcccacatcttaccctctgtggtcacatatttccatttattatatgtccctcataatgtctttactccacccctcatacctaatcaggttctccctttcccctccccctgtcctctcccatccaggcccctcccttctctgctcccatgattgctattttctgtctccctagcgggattggtgtatccacacttgagcccttctgaagcttgttaaccttcttgagttctgtggattgcatcataggtattctgacctttttggctaatatccacttattactgagtacatactatgcatgtcttcttgggtctgagttacctcattaaggatattttctagttccatccatttgtctacaaaactcagaatgtcctcttcttaatggctgagtagtatttcattgtgtaaatgaaccacattttctgtatccactcttctatcctgtgacatttgggttctgtccagcttcttgctattctaaataagtctgctatgaacatagtggagcatgtatcctttctatatattggagcatcttttggggtatatgcccagtagttgtatatctgggtcctcaggtgcaccatgtccaattttctgaggaacctccagattgattgtaccagtgtgcaatcccaccagtaatggaggaatgttcctctttttccacatccttgccaacatgcgttgtcacctgaggttttggacttatccattctgattggtgcaagatggagtctcagggttgttttgatttcatttccctgatgattaatgattttgaacatttcttttagtacttcttgaccattcaagattcctctgttgtgaattctctgtttagctctatatcccatttttttattgaattatttgatttttttgaggtttagattcctggaattcatgtatataattttcaaatccctaaaaactggattaaaaaatacttttctttgaattcttaatgaattgtttaataaaatacctgccacataatgacacattcccattatatgtattttagattgttatcagtaactttgttcttcaataaataaaattaaaatttacagtatgcaaatcataaacatattgatgaggatcaataatacatattttcattttgtttccatcaactgggataatctaagtgttgtatgatgctataatttgtgcaggtgatatggtggactcccaccatacaatgtggactcccacctaaataagaatcaaaggctatgagacaccattttcaactaatcacattgacccatggaggtgctaatctagtctatatttacccatatatcctatgaaactcaggcaggtctccttacacaatttttctcttctcaaaaccaccatgaaatcactctacctcgttaagctacttttaaattacccaatgtataaattgttttgttagtagtaaaacttgaacctgacagagtactcagtggatgagaaagggaatgaagaggataaatttgttgttgttgttttgacagcatttttttaattaggtattttcttcatttacatttcaaatgctgtcccaaaagtcctccataccctgcccccccccactccccttcccaccctctcccacttctttgccctggcgttcccctgtactgaggcatataaagtttgcaagaccatcctggggtactggttagttcatattgtttttccacctatagggttgcagacccctttacctccttgggtactttctctagctcctccattgtgggccctgtgttctacccaatagctgactagagcatccacttctgtgtttgccaggcaccggcatagcctcacaagagacagctatatcagggaggatgaccttttcttacagaccttccctctctgtactggaatgtttttggcttgggcttgagctggctttgtgtgtgctatgacaattgctgtcgttttgtatatggaacttccctaccacatgcagaaaacactgtttccctgtagtcatctgttgcctcaagctctttctgccttatcttccacaatgatcctagcattgggaggaggagatagtatgtagatttctcatttcatgctgagcattacacagtctcttattgtctgccatttaactagtcagtgatctctgagtagccatctataattgcaaaataagtttctctgatgaagactgagatttgtccccaatttttttatgaagataagtcattagaagtcagtttaacactatggctgcttaatggaactgtaggtcatggcctctagaaggaaaaaaaaaacaatgatgtttcttaaataaggttacctttctgtaatcaaacacacccctttgctgttcctgggtatggaggcatcattaatatttcaccattgtcaattcttcatccattcatgtattctgtattgtactaataactttgggataacatgtggcacatctactgatgaaatattagttagcagaaaactaataatattttgacatgtgctataatatagataaagtttgaaaacatggtgagtgagagaaacaaggcacaaaagattcatggtgatattccattcatatgaaattttgggcatgatatgatatgatgtgatatatttaagtttgaatttagcttaagagaacatatgcaagcatataatcgattagtggttgcttagggcagattggcaaaattaggactgatgggctcggagattttcaaaactggaacaagcagattcatgaatgacactctggtcttcattgagcacctggaagtatactatgaaaagcagcaagtttcatatgatgggctaattggagatggtactagcttaattaaataaacttattagatttttgcattcgccttatcagaaggcagatacatttggtaaaccactatgcatgtattaattatacaaatgaatttatctttcaaagcaatatttcaaaactagttttattttaactaccattgtatgttactgtgaggaaattattttaaaaagaaaatatactttactaagctatagtgtcagcaaatgcagagatagaatttgaacccggttgttcatgttactcccagactcattctgatcttatattttctgtgctccaggcacatggaagtggccactatgaccagaattccctttgttctcacaatatttaccaatattttatatggtatgcattcccacacattaatatgttggaattgtaacttctataagagtactattagaagcaaaattaagggggaaatggttaatgctgtatattacagtaattacaaattggaatatcaaaaacattaagggcatgaactggtttcttaaaccacgtaataagagagcattagaccagcaccttagaagcacagaaaagccttcaccatatatcagatctactgggaatcttagacttccacttttacagaaatttaagtaatatatttataaatgttgagtttgtagcattttcacagaataccccaaatgttcagagaaataatggtgatatcagaaatgtgattctgcattaatgagcacatcctgaaatcgtctttgcaagtgggttaaagatgaaaatggaagactcttgaaatgagaggtagcaaggtccaggtaccgtgaaactgactttcattttgcaagccaaggctgtgaccacagcagaaatggcagtaactcaacccctacagatgttggtagtggctcttctacctccatcagatggcattttctctatttggataatggtgtcctatgatgcagctgtgataaatgataatcctgattctctttagtacctgtcccgttatccctctagactcaaatcacagaagacacccaaggagaaagataaattatgaatcccaaggtttgatacacttcaaaaggcattacttgcatttcttaattcattccacaaaatttaggagacatgtgtaagaatggagattaaagataggatgttttaatcactacagagggatcataacagaggattagagtacatttttttagacgatctaagaaaattttctatatttaatgttaaaactcatagagcaagagagggacctaacaatctgacagttaactggctaagtcatacagcaaataatagtccacaggaagagaatggaaatgcccaacttcaattgtttaggataccagaaaggattcaacagcttaggaaataaaaaagttgcattgattttgtcatttaatatctcttctcaacactggaatagattcaaaatgcttacctaacattgagaaacaaattttaaggactttggcatccctgtaatgtccttttcattaaggcttcaactggtgcttgtaatgatagatattcatttggcatcctaaatggaataacagccatcaatttcaagagtagtaggtttgagagagatcacacaaccacaaagacaaggtgggcatgattactaccatgaatgacagagtcagagaagcatccagaataatatgattcatacactgccatgatgctagtttgttcatcatagagtcacccctaaaagtgaaaaactagggaaattgtttaaattcttacttggtttgtataagaaaaataattgctgggaagtagagacattgcagtagtaattgtctaaaacagttaagcagctttgaagctgggaagtggtcagaccatgtgagagttttgagatgaattctaacataagtttatttttgtgaatagaatgtccatggtaattctggtgttcttcaaaaggaaggatgtgtattgtaacacaaatttgagacttcataatcaacgctaagcaaattatgcagctagtatgcatgctcacctagaatgcacaatggcttaggttccaaccccagcaccacactgtctgtaatgacatgtgcttgtaatcctagtacctgggatatatgtattcaggaggatcagaagttcaaggtggtccttggttatatggtgactttgagactggcctggaatacagtagaccctgatgatacacaaatcaaaaaacataaaagattaaattgtagctactaacggctaccatgttaaagactaggttaaaaaatgaagaagaaaacatttgcattgtaaagaggaaaggaaactaacttgatccatacttgtgtcatattattttattatggaagacagaactcaagagacattaagtcaaatatttggtttgaagaaatcattgaaaggtcttgttcccctggcaatgtttagtgaaatataagatggataaatgagggtgagacattcttttaaaagtaaaggcaaacctttaaaaggatttggaaattctaatcctgtttatatggaaaatatatggaagcctaaaagttcaattacataccagcgataactggaacttattcttgtctctcaggtacagaatgaagaggttttaatgggtcaggggttatttcaaagaacatattgctattaatattgtggacactacttgttgtctgtaattataatttgttgttgtaagatttgtgacaccctctgttttctctgtggtatctgctgaatgaagaaaactacaataactatgttcattgaaattttgcaaacatcacccacagggccaaagccaacatggagactaaaattaggaaagtgctaactggtgccatagacaaaaccttaattctatattagtagaatagctagcctgcagttaccttacagacattggactctagtggtacagacatacaactctagtttatgtataccatggtataagcttcaccaagagagttgtgaggaaagtcagagccaagaatgagactaatagactacaaagttgctaaagtcacagtcacaaagattatgctgtatattttcttctgctgtatatgtttgactttatattttacaggtaggtcaatggttcattttgaaccattacaaaaatacatgacacagagtacaaacccgaaattcaaagttaggaatggatatctcaagtcttgttatgctttgtggaaaggcaactatttattcaataaagttgtcttctgtcattgtcaaaatcaattctcaaagacttcatccagggttctgtgacagagctcttacatagcgttcatgaagtcatgggtacaatccaatttaaaaaagaaaagtaaatcaattacctttaagtatttaggctacttttctttttgcttatcagacttctacttatcattaaagattaatctggaaaacctaattttcagaaaatcccatttttttccatttattgattatatcttacattcagggtcacttaaaaactgcttgtgcattaacaatgattatttccagctgtgtaattgtaaatgatttgtattctgactgatgtgcatatcagtattatctgaatttttctataccaaatgtcacattgttcataaattttataacttttttaaaattttgagtaaataacattccaattatctaatgaatatatcatgcaaatatatataatatttatctattttcaatatataaattgaatacatataaaatatatttctatataatatatgtaatattatattcctataaccaaatattgttaaagtaggatagctttaggcaaggcttgatctagaaactgagtagacactgaggacatgctctctgccactaattctcagtggtgtccagtttcattgttgcaccagccttaagcaggttctactgagtactgacaatgaaattacctagtaacttcaggattaccttctatcactttaacagtctcagtagattaaagatgggtctcatttcttatggtccttgaggaaatgtttctgattgcctattgaatcatgtttcttcttaaaactacccgtgtgtactgataagctataggttacttccaaatacccacactttgatcacagaagcatcctcgtgattatgccaggtgtactaagaaaatgtaaaaccatttcctcacacaaaatcctcacacaacatgtaatgacaccccccagatcccttttgttatggaaggagacataactacaagttctcatgttagaaggtagacatgtttgggaaggaattactcaaataaactttggtataatgctattaagtattaagttgttgcatttgtctttcctgctttattgggactgctttatggaagagtgcctgtatataaactcatctagaatccaactcttaaatgactgagaatgttatctaccataagagaaacatgtatatagagctgagatttttgcaaaaccacagggagaaaatggaaaacatgttgtatttcatttgtgtcatttcaaatagacagttgcttccttgatcttctttttttgattaataaagtaataatgtaggctggtttgtatctcctttatttgatagattctgtttgtaacacaagaatacgatttctatcagtctgcaaatcatttaactgtttccaaatgacaactataatttgtcctcagctgctccttcatgtgctaaaagaaacagaaaaccaaggcacttgtgtaaacagtttaaacaataagcagccattggcttaattatcttgttcagcaagcatctctatacgaatcaaatttttgttgtctaactctttacgatgactttatcatctgtagctattgtcttatcctaaaccatttatttcttttagcttactttttaattttttgctgattctttgtgactttcacattatgcacctcagtcccactcatctgcctgtcttctcatacctgccctctgcccttgcaaccttctccacaaaagaaactaaaaatcacacaagcacacaatcaatctaaaaacaaccaaaacaaaacaaagcatagaaaccatctcactgtagaagctgttttattccacagtgtgtccaaaagtatactccattctccatgcatctttacttaaaaatgctcattgcaatgagtcattggtctggttcgaggcctctggcttctgtcacaccatcaatattggaaccttactaagactccttccggttatcctgttgttgtcttgtgtcatggagatcctgcagctttgcatcagcagaactgaccctttcattcactctaacgattcctagatggtgtaaggttttaggtgtgataactcaatgtcctgattctgggcctgggttgtagctggcggctctcccatatgggaaccaccaggatgagctctccagcccctttccaatagtccacacagtgctgtcatcagcaggaagcaggggcttgcagagccagctccagtttgttttctcaagcgtggtgcaggggctgatctccaaagtgctgcatctggttaggggaacagacagttttactgctctcatgacccgggccagctctccagactaccttagttggcaaggagctagggtggtggaaggcatcactcccactacacctgatatcagatgagtattagaccagttctcccatgcttaatccctgggggaggtggctcatacacccgctctgtgtggggcagctttgctgtattgtccaggagaggtgcagtgctacctctcctgagggttgcagttggcactgggcatggtcagttctccagaatgccacagttagagagggccagggcaagttctgcgccacccttgagcagaatggttgggaacctatacagttgcaggcagctggagatactcacatggtctctaattgtaatgtgagtcacatacatcaacattacatggccactctgcatggccacatacccagatatggccttcggtagcaatacaggctgggatttcagcatgggctcagtgggagggactagctactaccaacccgctgttcctttcaaaccatgcgtgtccagttctgtctctcttcataatgctcaggcagttctgcatctcattctctcccatctgtccaccacatacttgcacattgtagttgctcacactgcagtcagacatgtggctagcaggctacagagggattcctcctctgcctgctctgcatggctttggcaagtgggtctctaggtgtctactgcctgcctatgtgacactgcagccagtggacctcttcctactccttcactgcttgacatgtcagtcgtgatgcctctgtgtatctacagcctgccagtactgtgcagcagcaggctggtttctagaaatctgtcatagtaggtgctgcgtggcatggcccatgtggtcccctggatgtcttcctcctgactggctgcatttagtggctctaggaaggcatctctgcatctacagtatgtccatacagagacacacaagtctttcacctttgacttaaatttaatgtacagataattcgtgtcagaaattatatttactactataaaggctagaaaagacaaatgcattttcagtgtttttggtgttttcaagagaaatcataaaaatttgagaaagagtattagtatagtagaatataaagatcatgcccaatgtaaaaatgatgtatttttaatttttaagagagaaaaaaattgtgaaattggaaggaaatgtggggactattcaacgagaaagtaattcttaaggagacgtaagtacctgtgagacagacaagggacaagagaatcctagaagcgaacgagccactaaagcaaggaagagaaatgctttggactaatcttggaagcttcttctggttacactagtgagcagggcaaattcaaattgctcataaaacctgagagagcaagagtccctcatagacatcgtataagcatatctatagttttcatctagaaaccccagtagtttgcaatgagggtggacaagattaggcaatatccatagatattttgattgccaatataggggtgaggaggttaggagatatggagggaagagcacacttctatgtctatacaatgggtaaggtttctgcttaatatccagcatgcacaggaaatcgaacccaaggaaaatggactcactgcaagacagataagggattctatagggcaaagactgtgtgtcatggtagagtattctcctagtatgcttgaaaaactgacatcctacacctatcatctttactcccttgccaaaaggaattcatacatagccttacaggtttatactatttttatttctttcttattttacagtgttaggaaactgagatcacttgatattatatatcttatccaaattcccaaagtagttaatagcactgcaaactctgagtcatataaaaggtaactagagtggatataatcaaccacctaattataatctctgattacaggaatggccatcgttgcaactggaaatgaatgtatgtgaagtgctctgcacagggcttgacacaaagcaagcacttcacagaagtgttcactgctttgtacagtagcagctgctttcttctatgtatcaggtataggtcataaacagattgagctgaaggagaagggaagaagaggctttaaaaccctgtgtgctccaggactgtgtagaatgaaagtggagtggaaacagttaggcactcttgggggataaatcgtgtccatagaggacattcagaagctagcaagggtatgaagtggtatgagtggtaggggaacagtgggagtgatccaagagtgacattcattttgagcactaatttttcacctcactatcatgaaagaatcaaatgccattccaggagttgctgtgtttatctacagcagtagacaagcttaaaccagaaagcagttagttcatggctacataatttctgagatgtcttttgacatttggagaaaggaaaaggatgacgttcttaaagatacagtatctaaatttttataggtatgatgacgacaggtttagcattcacttctcttctggtatatattgacaaatgtaactctatcttccaacctggctcaatgagataggtagagagtagggtgaagaatcattcaaagatcacaaggcacagtttttttttttctgctgttgctttttaatctgttttgtcttgcttgcaattttgatacattgttaaagaagagcctagccaggctggtcaggttgcatgcagaggaaagaagcctcgggaacggacaccttgtcatagaatattttaataatgagtgttctcattagatatcagcaactaagctaccaattgcatgaacactacttcaccatcagccttgcagttgtctgggacaggtgcttcagattactgctaaagttttagagctttgaagaggttgaataactccagtaacaaaactagcaaatagtaaaatttacgtctaagcaggatgttagactgaagatccaagcatttacccagatttattcgtgtatagctggaggtttctaatttcaaaaactctagttcttctgtgttttatgttttatttgattgcatataaataagatcagaaaaatagctattatttatttaagtacatgtccttcttagacctctgtgctaacctttattagtactaaaccattggctttctggacatatcatttttttttatttattatggtattcttgcaacatttttaatgcaacacctgctttttgttgctatatcaatagagaattaatagagggttaaggtttaggattctatggactccataatctgcagagacacataaataaatctacaaataaaaagaaaacaatggacaagtgctgtcaagaaaataattaaacccagtggtgtaagcagactttgggtgcccactgcaactgcttctaagtgatgtgttctcttagatgatcaaagaaactggtgccaaatagaacaaagggaaagatgtgcaaagctctatttgtgcacataagtggttaatgcagaggccaaagtgcagagacaggtgatggggaggaaaggttaaagaaaggctgagaggaggtcaaagccagtcaaagaatgattttacaagtcaatataagaaattaaaattttactccttgtacatggagatacgtttgaatgaattctattctatttcacaaggaactattgtcctcaaagacagatctgagtatagcgaagaagttaaagataccaggaaaatctaattttactctaactttatcagttcatatttcatgcgaaaatgagcaataagcccctaaagtctttcagcagcttcgtttttaatggaaaggtgtgctgtttgacactttcatcaatcagtgggtgccattaatctgcatgttgtgttacagggagctgccatccttctgacttttccttttctttatgtttttaacttttttcttcttgtgaaattaattcatgtcatttccctttgaaatcagtggcatttgactgcacaagcacttagaggcaccctcctgtgattgtaagtttagtttaattacactgcttgtcagcagcacctgaagaaaaagagccagatgctgggccagggtcaggggtatattggggaacccttaggatacccaactttcatgtggaaagtggattgctctaggtggatagggctgtgtggaagggcatctgaaatggttggatttggtgagtgatgctggcatttggttcttaacattgttctaatgttgagccttgatatgaaaagaacatttgagcaagtacttgtaagatgtcatcaatttcactttagaatctgggttttgagaaatgcacttagaaacttagagaagactaataggcttgtgaagggttgaatactgtcaatcatactatttggttgttctacatgaacacgtgtctccaggcagaagtctcctgttgaaagttaaaatctgaatgcaaagatcctaacagtcatcaacccatcggatattagactttaatacatttaaggtcatcaacattaataaatacactatgcatttcatgcagtctttttaactttgtttttctgccacatgtttgcatgttaacaaaaagcaaataaacatatgaaaaacattgaatgatctaattataaaaatgtgggaaagaatcatcaattgaaaggtttattttatttcatttttacttttattttgttgtattaaatttatctggttaacagaacagtatcaatatgtcaatgcaactccttctattttgctacagtagaccaatgggtgtaataaatatgcaaattaacattattttgtaaattctaatacttggtagtttctcactcttggtaactacaaagctgctatcttggtttggatccccatagttctcaattattttctcatggttctccagggtctcagtggtcctgctcctctgaaaattcttctgcacatgtcctttgcaatgttttagtaaacctcaaatttattacaccatttcttaattcaatatttctaaattaaatccctgttctttttatgcaaactcttccaaaagctaaaaaacaaaattgttcttgacctggatagtctctgtgggttcatcttcttttatcacaattttttctgtatctccagttctgcaccagagttcttcctaaagcacaaaaaatgaacagctgcccaattcaagcttcagtttgccaatataagcaatatgtatttgtctaataaacaaatagaactagattaaattgctagtgcttatattaaaaatttcatttataatacatttttgtgaaggcaaaaggaacctagatttaaggcctcaggtttacataaatgacaataagaaagaaatggcattaaaaagggaagggagacctgagcttggctccctgggacccatgtaaaaaataggatgtggttcctggatcccgccaagactagtctgtgcaagtgagagtgtggacttcagaagctaacagcttctgggacaggcagaagccacaaagcttctgaggcagacagcattttgggcttcagacatccgggctctttccctgccagaggagaggtgtctgccccgcctgggagggctttgccagagcatctgggggagccatcttggtttctggatcccaccaagactagcctgcacaggtgagagtgtggactacagaagctacacagattctgggacaagacctgcttctggccttcatcttttgctaggaggcagacccgaatgccagatatctctccaccttccctgcaagaggagagcttgcctgcatagagtgctctaaccactgaaactcaggaaagatctagtctcccaggtctgctgatagaggctaacagaatcacaagaggaacaagctgaaaccagagacaactataaaaactaactccagagattactggatggcaaaaggcaaatggaaaaatcttactaacagaaaccaagaccactcaccatcatcagaacccagcactcccacctcagccagtcctgggcatcccaacacacccaaaaagctagaccaggatttaaaagcatatcttatgatgatggtagaggacatcaagaaagacattaataactcacttaaagaaatacaggaaaacactgctaaagagtttcaagtcctttaaaaaaaaaaagaaagaaaaagaaacaggaaaacacaaccaaacagggagaagtccttaaagaaaaacaggaaaacacatccaaaaaagtgatggaaatgaacaaaaccatactagacctaaaaagggaagtagacacaataaagaaaacccaaagtgaggtaacgctggatatagaaaccctagggaagaaatctggaaaaatagatgtaagcatcagcaacagaatacaagagatggaagagagaatctcaggtgcagaagattccacagagaacattggcacaaaaatcaaagaaaatgcaaaaagatcctaactcaaaacattcaggaaatccaggacacaatgagaagaccaaacctacatataataggagtagatgagaatgaagattttcaacttaaagggccagcaaatatcttcaacaaaattatagaagaaaacttcccaaacctaaagaaagagatgcccaggaacatacaagaagcctacagaactccaaatagactggaacagaaaagaaattcctcccgacacataataatcagaacaacaaatgcactaaataaagagagaatattaaaaacagtaagggagaaaggtcaagtaacatataaaggcagacctatcagaattacaccagacttttcaccagagactatgaaagccagaagagcctaaacagatgttatgcagacactaagagaacacaaatgccagtccagggtactatacccagcctaactttcaattaccattgatggagaaaccaaagtattccactacaaaaccatattcacacattatctttccacaaatccagcccttcaaaggataacaacaacaacaacaacaaacaacaacaaaacaaacaaatacaacaacagaaaccacgtcctagaaaaagcaagaaagtaatccttcaacaaacctaaaacaagagagccataagaacagaacgccaacaataacaacaaaaataataggaagcaacaattacttttccttaatatctcttaatatcaatggactcaattccctaataaaaagacatagactaacagactggatacacaaacaggacccaacattttgctgcttacaggaaacccatctcagggaaaaagacagacactacctcgcagtgaaaggctagaaaacaattttccaagtaaatggtctgaagaaacaagctggagtagccattttaatatcgaataaaatcgacttgcaacccaaagttatcaagaaaagacaaagagggacacttcatactcatcaaaggcaaaatcgtctaagcagaactctcaattctgaatatctattgtccaaatgcaagggcagccacattcattatagagactttagtaaagctcaaagcacacattgctcctcacacaataatagtgggggacttcaacaccccactttcatcaatagacagatcgtggaaacagaaactaaacagggacacagtgaaattaagagaagttatgaaacaaatagatttaacagatatctacagaacattttatcctaaaacaaaaggatataccttcttctcagcacctcacggtaccttctccaaaattgaccatataattggacacaaaacaagcctcaaaagatacaaatatattgaaattgtcccatgcatcctatcagatcaccatggagtaaggctgatcttcaataacaacataaataatagaaagccaaaatccacgtggaaactgaacaacactcttttcaatgataccttggtcaaggaaggaataaagaaagaaattaaagactttttagagtttaatgaaaatgaagccacaacatacccatacttatgggacacaatgaaagcatttctaagaggaaaacttatagttctgagtgcctctaaaaagaaactagagagagcacacactaacatcttgacaacacacctaaaagctctagaagaaagggaagcaaattcacccaagaggagtagatggcaggaaataatcaaactcaggggtgaaatcaaccaagtggaaacaagaagaactattcaaagattcaaccaaatgaggagctggatctttgagaaaatcaacaatatagataaaccctttgccagactcactagagggcacagggacattatcctaattaacaaaatcacaaatgaaaagggagacataagaacagatcctgaagaaatccaaaacaccatcagatccttcaacaaaaggctatactcaacaaaactggaaaacctggaagaaatggaaaaatttctagacagataccaggtaacaaaggtaaacaggatcagggtaatgatctaaacagtcctatatcccctaaagaaatagaatcagtcattaatagtctcccaaccaaaaaaaagaaagaaaaaagaaaaaaaaacgcaggacgagatgggtttagtgcagagttctattagaccttcaaagaagatctaattccagttcttcacaaacttttccacaaaatagaagcagaaggtactctacccaattcattctatgaagccacaattactctgatacctaaatcacagaaagacccaacaaagatagagaatttcagaccaatttcccttatgaatatcgatgcaaaaatccttaataaagttctcactaaccgaatccaagaacacatcaaaacaatcatccatcctgaccaagtaggtttaattccagggatgcaggggatggtttaatatatgaaaatccatcaatgtaatccattatagaaacaaactcaaagacaaaaaccacatgatcatctcgttagatgctgaggaaacatttgaaaaaatccaacacccattcatgataaaagtcttggaaagataagaaaatcaatgcccatactgaaatatgataaaagcaatctacagcaaactagtagccaatatcaaggtaaatggtgagaagctggaaggaatcccactaaaatcagagactaaacaaggctgctcattttctccctacctattcaacattgtacttgaagtcctagccagagcaattagacaacaaaaggagatcaaggggatacaaattggaaaggaagaagtcaaaatatcactttttgcagatgatatgatagcatatataagtgaccctaaaaattccaccagagaacacctaaacatgataaacaggttcagtgaagtagctggatataaaattaactcaaacaagtcaatggcctttctctacacaaaggataaacaggctgagagagaaattagggaaacaacacccttctcaatagtctcaaataatatgaattaccttggtatgactctaactaaggaagtgaaagatctgtatgataagaacttcaagtctctgaaaaagaaattaaagatctcagaggatggatagaactcccatgctcatgaatgggcagaatcaatatagtaaaaatggctatcttgccaaaagcaatctacagattcaatgcaatccccatcaaaattccaactcaattcttcaatgaattagaaggagcaatttgcaaattcatctggaatagcaaaaaacctaggatagcaaaaactcttctcaaggataaaagaacctctggtggaatcaccatgcctgacctaaagctgtactacagagcaattgtgataaaaactgcatggtactggtatatcgacagacaagtagaccaatggaatagaattgaagacccaaaaatgaacccacacacctataatcactttatctttgacaagggagctaaaaccatccagtggaaaaaagacagcattttcaacaaatggtgctggcacaactaactggtggttatcatgtagaagaattagaattgatccattccaatctccttgtactaaggtcaaatctaagtggatcaaggaactccacataaaaccagagacagttaaacttatagtggataaagtggagaaaaacctcaaagaaatgggcacaggaggaaaatttctgaatagaacagcaatggcttgtgctgtaagatggagaatcaacaaatgggacctcataaaattgcaaagcttctgtaaggcaaaagatataatcaataggacaaaaaggctaccaacaaattgggaaaggatctttacctatcctaaatcaaataggggacaaatatctaataaatataaagaactcaagaaggtggactccagaatatcaaataactccattaaaaaatggggctcagtagatgggtcacacgacccctaatggaagagctagagaaagtacccaaggagctaaagggaactgcaaccctataggtggaacaacaatatgaactaaccagtaccccggagctcttgtctctagctgcatatgtatcaaaagatggcctagtcggccatcactgcaaagagaggcccattggacttacaaactttatatgccccagtacaggggaaccccagggccaaaaagggggagtgggtgggtaggggattgaggggtgggtatgggggacttttgggatagcattgaaaatgtaaacgaggaaaatacctaataaaaaataaattaaaaaaatggggctcaggactaaacaaagaattctcacctgaggaataccgaatggctgggaagcacctgaaaaaatgttcagcatccttaatcatcagggaaatgcaaatcaaaacaaccctgagattccacctcacaccagtcagaatggctaagatcaaaaattcaggtgacagcagattctggcaaggatgtagagatagaggaaaatcctccattgttggtaggattgccagcttatataactactctggaaatcagtctggtggttcctcagaaaattggacatagtactaccggaggatcccgcaataccactcctgggcatatattcagaagatgttccagccggtaagaaggacacatgctccactatgttcatagcagccttatttataatagccagaagctggaaagaacccagatgcccctcaacagaggaatggatacagaaaatgtgatacatttacacaatggagctattaaaaagaaataattaatgaaattcctaggcaaatggatggacctggaggacatcatcctgagtgaggtaacacaatcacaaaagaattcacacaatatgttctcactgataagtggatattagcccagaaacgtagaatacccaagatacaagatacaatttgcaaaacgcatgaaactcaagaagaatgaagaccaaagtgtggacactttgccccttcttagaattgggaacaaaacacccttgaaaggggttacagagacaaagtttggagctgagacgaaaggatggaccatctagagactaccatacccggggatccatcccataatcagcctccaaatgctgacaccattgcaaacactagcaagattttgctgaaaggaccctgatatagctctctctctctctctctctctctctctctctctctctctctctctttttcacatgtgcctaacatcatttatttaaaaaattaaatattttctacactaaattatcttagtgcttggcagataccaattgactatataaccgtgatttttgcctccattcacttattttctattaattccatacagatttaattttttaaacttgtttagctgaaaaatttgaaggcaacaatcgtgagactcgaaattctgttctttttttttttttttttttctctcatgtctcttgtgaggctatgctggggcctagcaaacacagaagtggatgctcacagtcagctattggatggatcacagggcccccaatgtttgacctagagaaagtacccaaggagctaaagggttctgcaaccctataggtggaacaactatatgaactaaccagtaccccctggagctcgtgtctctagctgcatatgaatcagaagatgccctggacggccatcagtggaaagagaggcccattggtcttgccaactttatatgtctcagtacatggatcgccagagtcaagaattgggagtgggtgggtaggagagtggatggggagggtatgggggacttttgggacagcattaaaaatgtaaatgaagaaaatacctaattaaaataaaataaaaaaattttaaaaaatagggaagaaaagggaagggaactttattctttatttgttgaaatttcattattttgatatttgctaaaaataatcacaaaagaatcaatgcataagttagtataagaaagaaatatacatgagaactttaaatgtatcaccttaaatcaacaaaaatgtatttttaatgagttgaaatttgtggcataatcttgtgattgccatatccagggatccatcccataatcagcttccaaatgctgacaccattgcatatactagcaagattttgctgaaagaacccagatatagctgtctcttgtgagactatgccggggcctagcaaacacagaagtggatgctcacagtcagctattggatgaattcacagggcccccaatggaggagctagagaaagtacccaagaagctaaagggatctgcaaccctataggtgaaacaacattatgaactaaccagtactccggagctcttgtctctagctgcatatgtatcaaaagaaggcctagttggccatcattgggaagagaggcccattggacttgcaaacttcatatgcctcagtacaggggaacaccagggccaaaaagtgggagtgggtgggtagaggagtgagggcgtgggtatgggggacttttgggatagcattgggaaatgtaaatgaggaaaatacctaattaaaattgttaaaaaaaagttgttattccaatgaaaacttgaatttctatttaaaaatctctaaaaaaaaatcactaaaaattcattctggaaaattgtgatttgaatattaaagtaaagtatcaagcacacaaatattggtgttcaccaagattttcctttgtgcaatgagactgaaaccttgaagcattcttcttggtgcttacctgttgccacagtatttacctaattttcaattaatcgtctaaaactagtatttcatgggctgagaaattgtataaaatcagtcaagagagtcttatataaactctattcttgttttggtaaatcatattttcttatattcaccaggcttatgtatcaggagtattattgttttcatgtgataagtattttcaatttctttgttattataattgaataaaccacattaaggacaattttccttttaacaatgctttgcccatttggggtgttagagacctcagtttgaaaaagtatctgtttgctgtttaatcatgagtttggtcctcaaggacactcataaaaaaatgtgatcgataaggcacaattgtgatttgggggctgtgaaggcagagaaaagagcatctctgggcctcctggctgcagactaaatttccatgttcattgagagactgtcttaagggtataatgtagagagcttaagaactgagcaaagaaatcatcctctaacctctgattacgtgtatccaaacacacaaacacacacacacacacacacacacacacacacacacacacacaaacacaagcacacaaatacacagcttttgaggatgcctgaaaccttcataagctctcatatttgcatacacatctgcaagcatgcacattcttacaaacatgtgcatataaatactcaaatacatgcaaatatgttgcacaatagaaacttaggcacttaaaaaaaaatctgctctcctaacattgagtcatgtgcttctaagtcggtacaagcctggaatcacaggtgtgctgctgaatcttcagtgtgaaagaactgaagtatgatgtctatgtgcttagtttccagagagaacaatggtgaagtggcgcagaagacaaaactatagtttcctaaatctgcactgcggggctaatgctggaaaacagcgcattccaaaggagttgtttagaatcaagtgctgatttagctggataaaatgcagctgtcttatcaaattacacaactggattcacaccatcgactaattcctggtggaattttaaagatacctttatgggtgattttcttcccagtgcagagattcttaaattagacggttttaaaaacaggaaaaaaaaaagcctcaagtatctactcacaaggattatttctgttagcaactgtagagaatggaatttgtgctttgttaggtctaaggtcaccatttcaaaagaattcctaaaatgtaactgaatctaaataaatttcaaactgacaaattgtcatacattttttttaaagttattttttatatgacttcaagtcactctaatcatttgtcatggtacccaacatattttaaatgatgagaactcctctcatgaacacaacttcttcactaatgtccttactttacatactttttttttgtaaagagtaactttctatggagaatattatgcaatatctaataatcattgaatatcagggtgaagaaattaaattcagttggcttcacagtaaattttcttttaaaaaaataatccatatttttaaatgaacgtatctctcttaaaggatgctaatggtcccttcttgccttcaggtctttccacctaccttgtttcaatattcttgtaacattatataataacttataacatttgtgtgtgttggatgtgtattcatatgagcatacatgtacatatctgcatacataaagagatgcaagaagtgtctttatcggtctctttctcacttgttttgttagacattgattctcactgaaccttagttcactaacttgaccatagtggccactcagagagctccagagatttcttatctctgtcttcccagttctgggattagagatgagtacacagtgcttttcatggagatgacattcaggtactagaaattctgcagcatgcactttgctgactaaggcaccaccctagttccatgaattatcattaaattagtagaactatctattgatttttttcattcaaacaagtgggcagttcatttatcaaatcaataaggatatattaagtagcaaagtatcagacactgtggtctgattttttccctttatcattcccttcttcattctttctcatttgcttttccattcccaaactaatactaaagagaagtataataaacaaacaaacaaacaacaagagtagcaggagcctatcaagcaaccccagtcaggtccataaagatgaggaaagacagctaaaggagatattttcacattgccaggtagatggggtgaatgggaattagtgatgtcttccataatgacaggcagtaataggagattattaaatcccctctttgttgggatgcatcaaatgactgtaacatgggaatgtacactggactgtacaggcaagataaaaaactgagacaaatattaaaatccaagagagaacaagcagtaaatctagatggggtaaatgctgcattttggagtttccatcatcaaaggaatgtattggaaataaacagctgtcttcatatatacttgcactttagtatcctcatctgtattactagaatctaagaatatacgcttgttgagatgccttctggtcctgaggcactgtctgtgttatattgcctaacagcacatatgaccataacaatatagcatttaatattaaagtaaattttaagttaatttaataggcttaatttatatcagcttgtgtgaattacagaggcaagcttgatatgattattctctgtttataatatatttgagactaaaagagagaactctcaggttttgttccataaaataatgacttagacctaaaaatatatactgtgcactgacaaaattgcctatagttgtggaaaatcactccttaaatctagtgagcaacatgatatacacagtctttttattttctttatttttaaacaaagttactgaattcatgctatttactggtttgtgtttctgattacaagatgctgtcccctgctgtttgctaaagattataccagctcagagtcaccaacccagagagaaataatatgacaagtttatttgatcttaacatcagaagatcaaaatgtggacttctgtgtatctatagaagaaaaaccaccttggggacatcaccttccctctgcccaagttgtctcactgcagtgaccttcatttctagacagggctttgaacagaacagctgatgcgctggaagcatgaggatggaaggccttatttactaagcaattatttcttctaaaagacagcttatgaaggatcttaaacccatgtatctattaagcataactgacatccctgatggatttatatataaacacttgtgtgtctcaactaagtttgcatgtgtgcttttaggagcgttcccttgctgagtctttatttcggttcactttaacgaagaccacccagcagtataaaacagtgccatctctacagaactacaaactctcctccggggaaccacactgataataagagccagtgtgttcatgactgttttctatatgacaggctgctctctgtgtgaccggaaacttgaattcatgggaaattagaagaagtgaaattgactggatctgggttcaatatttggctgtcatttaccaagtatatcatgacatttcactttgcctgccttcaaaatcgttcagctgtttgaatattaaataaagtgatgcataaaagaggctgcaaaacatcatacagaagcgtgattaataattgactatgaatgcaaatatgaatatcagatgaccagttcagtgtcgtgtagagcaaataggcaactttggtactgtagataggcaatgagacactaagcagaactaggacatcttccttgattctctacttagcatcattccttccttttatgtcactcaagagaatacttaactctgaagggtgataaaggtgtctagtaacagctggtatacctcggtttgaattaccatactgttgatcttccctatgctgtctatttccctaaaaagaattcctaatacctttcaatttacttttaaaaatggggggggggcaacttctctgaacccatccagagcatctagggaaagaattttccaatgtttccccagtgagtaaatgatgcttgaccaacacaaactgacgttataaccagtggcttactagtgtttgtgaatcaggccatgtaacatctttttaaatataaaagcattaactccttcacaaattcacattgtacatgtgtaacaactacatcaatgctctcacaaacctattgagaaaccataagcaaatgaagctgaatctgcgacgagggtattttcccttgcaggtgatgacatctgaaatccatattaccgcttctccttcgtcttcaaagaaatgtatagatatacatttttgaactccaaagaactaaatatataggggtttgcatataatataaaagggaaaagaacatttgtcatgaacttggataggcctttgatattcctgtagtaacacaaaagctcttatcttatttcccagccataattttttttaaacatttgcacactctgtttgagccaagagtggtatctgatatttggaatgttataaaacaaaaccacaaacacacacacacacacacacacacacacacacacacacacacacaaatcagatgaccaaatacaccataaaaaaaggccctaggagaaatgaaacaaaaatatttatttaccttcactttcaacaggcacagtcgctaatatttataatcatcactttaaatttcatttgacctcatatctcaaatatgcttgggagacttaaaaatgagtgactgtagctaatggaaagagttttgtgataattatataccagagaaaaatgtcaaaatatgtaactattttatcattgttctatggtccccgcttcttaggaaaggcagtagaggtgaaatttgccaagtgctcttctaacacggggtgatggaaaagcccacattcaggagcgagggatgctggaattgagttgtcaagctgtcccgaatgtcttgtacaaactgaacaggccaatttactgcaacactgcctagactgaaggctcctatctagcctttacacttgtttcctcctggagagattaccctgctcccccaagctttccctccctggcagctcctgacctaccctggattcctcctgaaaaaccaattctccaaaggagagcagtcttaatccctaccttgggaccagcgtgctggacttcccagagaggctcctaccatcaatctgaaaggaaaagcttagtgtttgttgataatttttaaatcaagtggtgaattgatttcaatatattctcttttgtaccttaaaactctcagctttcgggatgaaaaccagcaagctttaaaaaaaataaaaaataaaaataaaattgacaactcccacacagcctgaattgctttttctgattacaagcctcggacgctgaggggctgctttaaaacggcgtttttccgactctcccctccaggtggcagcagtgctacacctcagtggttccaatccctttttccctgacttcaagtgttaatgcaattgaccaatcactgctaagatgatgggaggtaattgggtaattgtattttactgatctctagcggagaaagggaaagggaaaggggcaagaaagagggccagaggaggggaagggactgcagtcctggaacgctttggggagtcaggaccctaagtaacaggacctggcattggtggaaagtctagactggcagacgctgccaaccgctcagtgagcgctttcatttatctgggaagagagaagagagaggagagggagagagttcaccgcgaagtggatggaaggggagccgggactatggcactgagaccggcgcagagcagctgcgcgcccgaggacgaatctcctccaggaggaccagcgggcgtcgggaacggctgcgcacagaggaatcaacttgtggctccagacggtccccaacgcagctggaaatgagatcaaagctgcagtttcattccagaaggatgagaggagccagtgattagagaattttttttaaccctcttcattcctgtttcgttaccccccccccttttttctttaaatatattttttgaatatttttttttcctttttaaaattacctaacaccacgtcagccccttcactttgttttccctgcttgaaataaaagcctagcctgaacttccacaaccttggggactcgagatctactgctggatgatggagaaggggacaccagtgctggcaggggccgctggcgagggaccgcatcgagcgtctctccggtgatccctgccctgatcgcccagttcagctatacctggaggacctgtacccagtgctgggagtgggggaggggacccagtgaaagccacccagagccttaaaaaaaaaaaaaaaaagtagctgaccgggggcggaacgggtttgttcttgacagctgacggagccttgaaattttcctcctctacctccgccccctcccccgcccctgccccccgcactccatttaacgtgagattatgaaatcgcagaggcggtggagggaaggcgacgggatctaacagggagtttggaggggcgaggggggaaggtggctgggtggctgaaatcaaaaatccaattgcgcactgggttgtgatgagaaatctaatcagatctttgacgaaggggccggccggaagggtagccggtgggggcagttgatccctaaattctccgaagggaaagctggggaaaggaatcgaggatgtaaagacaagacttttttgttcttctttctttctttcttttcttttctttctttttttccttttctttttctttttttttttctttccttttttttaacccccggaggaggtggcttttgggtgccttgctaaaatgaaggatacgggacgcagctctctcttggagcagaacgcagaggataaggtgatggtgccagagagaagaaagaatgaagctttttcttgtgagacctggatcgtaacataaatgtgtatatggccacacggagagcattggggggaaaaatgaaataagctgatgtcagacctgcggggtttggtgtattctgacataaataatcataaaatagctgtccccctcccccaaggatgtttggaaatgaagaactgaggatccacaaagaaaaagtgtgctcatttttctctgtaaaagagaaagtacgccaaggagatatttttggaatgaaaagtttggggctttttttagaaaagtaaagacctgatatatatatatatatatatatatatatatatatatttcttttggaatttcccacaagaggagaggaaattaataatacatctgcaaagaaatcccactgaagaaaagttgaccgtggaagaaggaagcattgattgggaaagaaatcagcagaggacccttggatcagtgcccgtgttgactaaaattgaaggataattgcagttggattttttttcttcaccaacctccttttttgtgtgttttctttctcgttttcttttggtgtcaagaccgtgcattctttcttgttcttaaccacctggatttccctcgggatgtagctgtgctgaaatacagtgagtgatcctaattttcttatttatcagggcagaaattgttcattaatttagtgttctggttctctttctttccccctcccccctcactgtggttttttcaaggacccggctattgggaacaagaaaatgagggacagggtggcccacgcagttgttccatcaagctgtgctcactgataagctggactgctataatgatgcaggttgtctgcattctacgcaaatgcctttgcaagtgttcagtatggagaagaaggaaagaaaaaaaaagctctccatgaaagctgctgcagtgtggggtgcggatgctagtgattgacactctagaatgcatttaagttaccaggaaaccccagagttagcagcacaaatgttggctattggaaatcgaaggggcccaatttaaatttcattatccaacccgacactgcagatcaacagaagtattaacacaaaactaagatactcaagcaggtgaaggatggcttctggctaattcataacagggaattgtgcggtggcagaggaagtggtagagcgcttcctgcactcccttgtctaaatgtggtctttgcatccctgggggcttcagtgatgaaactgtgactgaaacaaggaggacccattcaccccaccccttgtaacttcagactcccttggttttcagagaagtggcactcagattgtaaaggacctgaatatttagcataggctttgtgaggaaccctccaaacaccactaagatacagcttttgagagaaaaggcagacatttaccgtcctgcggtaacttagaaaggaataccaaagaacaatttgtgtgttgagtaccaaagcttatcatggaccaagtttgctttgaaagaaagaagtcaatgaagacaaacaaaccaacaaacaaaagtaaataataattaaataaaagagaatgttgcatgtgatttgagaggctgggacctacaggatcacctccccctcctccacctctgtcagagtcttagagcttgtctgcgatacagaaatgctttcacccccacctatgacacccacctctctctggaggcttcgattagaaccatgaactgtcaggtaactttagaactatatcacacaggctaagcaaagaagaaactgaggccaggagagaaaccataattccttggttaatgaccaaacaagtctgagacagatgactcacacaagcctcagagaagcagacaagttttgaatccaaactaggaagaaatctggcacatatatgaggctcacagctgccatttttatttgggagagaaaggcacagtgatctagagatgatgaagtaaacttctgtcagtgtagacaacaagatttctaagtgccaacatccctctcctctcctctccnnnnnnnnnnnnnnnnnnnnnnnnnnnnnnnnnnnnnnnnnnnnnnnnnnnnnnnnnnnnnnnnnnnnnnnnnnnnnnnnnnnnnnnnnnnnnnnnnnnnnnnnnnnnnnnnnnnnnnnnnnnnnnnnnnnnnnnnnnnnnnnnnnnnnnnnnnnnnnnnnnnnnnnnnnnnnnnnnnnnnnnnnnnnnnnnnnnnnnnnnnnnnnnnnnnnnnnnnnnnnnnnnnnnnnnnntatcccctctccctcttatcctctctccctcttatcctctctctgtctgtctcatggttcacaaaactctggctttaaaatatttaaatcccagaagatccacaagtctgaaatatcccaaaggagatagaaggcagctgcctcctgagtgccctgttagtgctgggcacgtttattgctctgagtggtagactctagagagtcattaaggatctgtggagttagatttatattagagaggtgataatagaaaccagaaacactctgctaacagcatctatgtctgttctttcgctcccatcatctgttcttatccttcttgttattccttaactaaggtagcctacagcaaagcacttccctaatttatttctctaggcacatgtttcctgttgggaaacacagattctgtaggaatttaccaacttatgaaaacacatgtgcaaattattttccttgagaactttatggaggcttctatatatttctccctccctatccctgtccctgtccctgtccctgtccctgtccctgtccctgtccctgnnnnnnnnnnnnnnnnnnnnnnnnnntctctttctcatcttgtgttttgtgtgtgtgtcttttagtcctttatgatttgcatggttattgttgttaattcaccattcttgatcatgtaacaagtcaagttatacaaagttgttgatcctctgcaacttagtgcaacaagcacagaagtaagaagagaagaaaatgtcttgagattttccttactttatagttcaagtacaggctttgtctggaaaacttgccctgcaagtatgctgtgtctgctaatcaggagttttggtactattcatctttgttttccataaaacttttctcaatactgaacactactcccattcgaccacaaactatatttttctgttcaaccttgtcatggcttttctgtccctctccctccttatacaaataggtagatgttgccaagaggagggaaggaagggaaggaaaagacagtctatttgaaatctgtgtcagaacaaagctccatctccctgacaggaccaggtattgaaggtgttccttgtgagtgaattactttgccagcatcacacttgggtgcccagactaagcttgggaatccccttctttggcttgggaatcacttggctgtacagtatccacaagtttttcatgggataggaaagaaatcctggctatggtggagttgaaatcctacctaatgactgcttcagctcaagttggccactcagtgtatttgtgctaggtaggtaaacataggcacagaagtctactagggaccacacacccagaaagctgcaggttagcactagttttaaaggtatttcaaatttcttcctcctgtaatctaatagctacaccctttgagcaatattttaaatttccccgtccctcatcttttttcttttgcttgtgggttgagaataacgtctaacttgttgataaattatacttgttttgtaaattataagtgatattctggaaaacctcagccacaatagtctctctcagggtggatgtctgtctgtcatggtcattcttgagttaattcatgtgtatctactttctgaggatgaatgaagtgtgaccaagtactttaagggtctgttggttaagttcaagcacagtgaccgtgtagtttaaggtttcccttaccagaatgggttgtttaaaatatattgcattatatatatatatatatatatatactgctgtttagaaaaagaaatctgagccaaaaaatacttaaaagataatttaggcataatgaaagaatgatttaactacacctatcatgttttctactttcaatcttaaagtttcataaggtaaccttggactttaagtgtcctctggttacatatgcaatcatcttgttctggaatgcataaataaagacaaatgcctttgcaaatatataaatttaaatgaaatagtacatcattctatcacagcacttaagagcccgaatttcactcccttgatgggagggcttcctattctgatgtgtaggctcaatctgagaatggtaaaagatgaaggaaaagccataagtaagtcttaataattttccacttgtctaagcagtgggtcttcaccatgatttgttgtttgtctacgatagtagtcctatactctgtccatgtgctcagtggacgtccttagaactctcttccctttaataattacaaaacaaagcccagtttttagtcatagtaactgatgacatcagcatcatattggcaagctgtgtataataatactgtcagcttggtgtatagcttactgggttttgattactgaactttctaaagcactttaaaatctggcagggtttggaaaggcctcctaaggttcatcgttctcactttccattaacacaaatgaaaaccgaacatgaaaaatgttcaccatttggtgcatcttatatttttgtgtgttttctaaaattaataaagaaatcaggcagaattcagatgcttttggtcaaactgaactcaaataacttcactgggacacatgaattatacttagcatttagcctatttcaaccaatatgcttatctgtaaattagagataaccacatgaagctgtctagcagaaaaattgaatcaggtttctttatgtcatgtactatcagcattcaataattccatgtttaaattaaccatctttggtctataatcaggtaatgtgtggaatagaaacaagagtaaaaatgggtttttgttgaaggaaaaatcttgactacaattcactttggtaacccagacaggattgaatttggtgttaataatgacatcttgacacacatagcagttacctgggattcatgatcctcagttgaggagttgcctcattagattgctatgttggtgggagtgtttcctgattgatatagaagagcacagcccactgcaggaagtaccatccttgaacacatagtcaagggttgtattaaaaaatgtaggctgaaccataggtaccagaccagtaagcagcattcctggtttctgtttcatttccttctgcttggttcccaccatgatttctgtcttgacttcctggattcaaggactataacctacaaactaaagttaacaggttcttccccaaagtgctactggtcacattatttatggaagcaaaagaattacccaccagtcatacagctttcaagcacacttggtcgtatctcagtgaaataatcagtcatcaaaagctgtgaatatactttgtggattgtgaaaaatatacactgtgtccatgtatactttggctgcgttggccagaggtttatatcatagataacaaaaattgatttgtaagtaatatcttagaagactctagggtgaagggaggcagattaagaatttatgatgtcttcatttggttcaaaattattttacttaataattattgaattgatagacaaaattcagtctgtggctgaaataatgaactaggtactttctctgagggaataggctgtgtttttctctgtcgtgttctcagaaactcatacccacatgcaaaaatttccagtcttttgatacctaactgtgcttcatttaatcatctcctataatgaattcaagtacatgtacacaacatgtacattcttgtgtacacacaaacccttgagaatgtgtgtgtgcgctcacacacacacacacacacacacacacacacacgtgnnnnnnnnnnnnnnnnnnnnnnnnncacacacacacacacacacgtgaaagattgttcctaataatctacaggaagttagtaaaaattcctcatgattgttctgactggatacacagagagagggaaagagaggctatcttttattgaaaatactggtctgaacattatgtgatccagtagatttttcttatttttgatgttgtcatgggtggactggtgatatttggaatgtctcatactagctcctttgtgcttacagtcacttctgttcagtaacatttaacacagtggtagttcaagcactaggaacctggtattgagtttatagttatctacctaagaattcatgattgctggtaattaagagcatataatgcctgatagtaggaaattagtgatgaagaggtgaatggaagcatcaagtcgttttcatttgcaggtacaatggtgaaagggaaaagaaaaaaaaaataaaggatgttcaaatacctcatcatgactttagaatagaaaaataccatgttataactctgttttagcacctgctagttatttttccctaagtagacagttataccatatacatctcagttttccacattgtaaaactggttacccttttctttatctttatagttgtgaaaactaagatatatatatatatatatatacatatatatatatatatatagtataatatagtatatatatacagtacagacccttggacattagtcaaacagagaggacagtagtacctcactgtctattctatgaaatccagttattttctgtggtaatgagaacattcagcatactattgagggttgtattgtcttttatctaatgagcataaaaatatagaaatgttttggcaagtttcctatcaaagttcataataatactttctttttatatttataaaatatcagtaagatcataacgaaggttgtacattatatatcatatatcatctatatgatatatagctatgcttctatttcaattttggtgcaggtttatggtagattcctgtagttatctaaaaagccacatttttggaagttttggatgttattaaataatgacaatcataattatcacttgggagccatgtaataaataccagacaatatgttgcaaataaaaattttcacttttactatcacttatggaacagaaacaatcaaaaatagggtaattttgaagatgtttccgcaattggaacgtgaggcacttatcgtcaccaaatatcagactcaatgtattaaacatattgtcttggtaacagcctggcagcatacgaccagatgagcctgagaatgttttaattgagtttggaatatcgttttcctcctcctacttcagtcacataacttgcatatttttatcaaatctcaatcatagccgactgtgtctttaagaaagtgatcacttctaagaaagattcaggaaaaattatgttaatccatctagaatatatatggaagaatgctttttaaaatatgtatgctattatctgtaaacacgggaataatatcaacgctcataagaatggtctttagataagaatatcttttacacaaggtaatcacatgaatgagacttaccaagacttaattacattacagttgagtttgataccatgcttacccctgagttcatgtaggtatttcagaggtttgaggatttatttttcaaagattagttttattattcattttactttctcctcctcttcctcctttctgattaggattcctccccatttctgagagctatttacctagttcatttggagacacccaactctattccttagccataattgtacatggagagacctaatcaatctccataatcaataactttcttactttcttggatctcatgttggcttcataaactttctacaattgaaattgattgttttccttccagtaacttctgaatctagagtttccaatacttatagctctttaaccttcttgtccaagcagtaatcaaattcaattgttagcttctgtcacacaatttcctagattccatcattgtgtttaacaatacacttttcttcagtgtagtttgtcactcattctcttacaagcattattctaagaataaagcttttgttctataatctgtgagtatctttgtaaactgaactccatgcttttctcctgattgtaaccaattgaccagcatggtcataccttctcttgtcttcctgcttttctaaaaatttcactcctctggagatctggctagcttcgacttgaattttgtagctgacacatgacactggccaagcatatgcttcatatgtcaagcctcaaaacctgcatcctcctagactcttacatatctttatctagacacataggtgtgttctttcttctgcttagaaacatcttggttatcacatgctcgctcttgtcattgttgcaatgtatctatctacctacttggctacacccactcaatttagataaagacctcatgatatcccttttctcatctctaacactcaccgagacaatagaaatttattttggcagaacctaaaaacgagttaaaaggaagggtctatgactgggatataaggtgaataaataaataaataaataaataaataataaacaagtaaataaataaaacaagtggacggagctaagacatggtcttaatttggcttctaataaaagctaaaattttaaaaatacttctgccattagaattactgtcacataattttctccagtgtctaggtttctaattagcattatttgtaaaatttattgaaattttctctgctttaataatagtatacatatatttctcaatcatcacttctcaaattgtactacctgtacatttttacaataagttgatacaaatagattaacaagcaatggtgccttaacttgttcaattttctaagtacatttatggttcctgtttggccttttgaaatagtgatggtagctgtccttgagaataccatttttaacataggcatatgtagtatagtgttatattttatctcactcgtattaaatgcttaatgcagattttgtcagacacattcctcacaggcatcactcacagatagtgtaattactctcccaaattaagttgttcactgcacagtattcaaagctgggtaaggtttgccttcccactctggaaggcctaccacaaagattatggatttcgagcatggagattacctgaatacaaactcttgcaaagagaatcagggtgtaagggctgaggttcttcttcctatcaaagtgtagctgcttttcacattatatcaagaacagcttttactgaacccagttgttttgatcttatgctttgaaatgatgtcttctcctttcttgcaaaaacaactccaaacaaacaaacaaacaaacaacaccagaaataacataaaacaaaaaaccaacagaataaactaatttaggtgaaggataatgctaagggaagatcaaactgagttatgtttgaattttattcttcaatctttagtaatgaatgtcttgactatttgaaatattaatgttttgttaaatattcactgaaatgttttctactcattttagatatcttctacttagaaattaggaatagtcgtaatttttttagtagataaaagtacgttgatagtgatttttacagtgtttagaacatctcacttttccttttcatcttatgaacaagttttttatctcaagatttccaatacagctgcatattctctactagctaacgagataatgcctgaggagctgagaatgggaaggtgccagggaggacttacttgggagagtcagtgctgaatctggtgattccttcttgccaaactaaagttgccaggagcacactgtttccttgagagtagctcatctgttcaatctcaccgatcttgaagaagtaataataagaaatgcaaagggaaagcaattattaaagtggatatggtattgcataagggttcacagatttagaatgggaagatcatctgtctttggacaactaatatactttcataattattagcctcatctattcctgtacatatagcctaagccattttgattgagatcttattatgaatgcatatgttcatttgcatgttttggttactaaatcaagaacccactgtaaaatattaagacatttattctcatgacaaaggatgtgtgttgtttaatgatagcttggtactgaggtgtagatttcagtaattaagacaaagattctaagaaagctttgggacctttggaagcgtaaagaattctttctcctgaatttttgcagccagatctcagatgtgcagacttttcacaatctttggttgatagtataaaaaaatgagggaaggagagagagagtggataaacctgacctgctgttataatgcaatagagagaatgttacttgtttattggctaatccctagagagactcacttaatctagaatcagcattctaatggattgtgagggaacttgggttgggtgcctctcaaagtcagaagccacccaaaaagagttaacatctatgaaatggtgctccggaaggcaagaatggagctatgaaggctttctctgtattgtttgaacgttgccatggcaatcgtttccagcagaagttacatgttttcaattccccaaagcatcaagcaggcattccctctcacccattctccatccgtgcctgtgagccttcattcaagccattgccttcttctctgtctgtcttctctcttgtcctcacttctctcaagttatcccccattaataacaaaagtgtccctaccctaaggggtcacttgtggcagaaagtaattcaggcatatagtactctactcgatccattttcctgtttccccccttctgtttacgtattaaagacctaattagactgaagctgtggatagaagccgggttcggctttcccttgttggtaggacacagaacatattataatggttggtgttgtggtgatatgttaattggatcgctccaggcaagtgcagagcagccgtctctgacaattagaaagaacaatggctttactatgaagcagctccctctctgaatcagtgcagggattagcatgcactgcaagtctctagaaggttcctgtatacccaagacagatctgcagttagaaatgcatcctgcccctttaagcaagaatgctgctgcctttcacttagcttattttcctggcatgggacaagaagtgagggtagatctggctaggtgagctgcagaggaaaccctaccctgttgaagacctaaaccctaggatatatcgtgaggatattagcacggtctctttgcctgcttaatgcacgtggctggtgaattgtgaaatgggtctcattagagcctttcatatcctggaatgtgccaaagtgcattgcaggcacagcgccatcactttgggtccagccctgctgttcttcacagcagccaagaagggacagaggctctgtctgtattaaaggcctcagtctcattcccctctgtctactgttcattgtaaggctcctgtggccctttcagcccagtcagggatgaggcacagcacattccctaggtgtttgtggagaagaaatgtgaaagattctaagtatcactgtggagtttaaggcagccattggaggctgctacctacataaccccccactcccaggatgcctttagggttgcacttgttttgctttgtttttgtttttgtttgcttgcttgtttaattgttttcctgaaaatatttccagatactcacctgaaagaaagtatgggtagactgtcctaactaagccacattgtattattagatacaaaaactctttgctttcccccactagcttgacatactaagggttttggaatgaacctatatatcccagaatatagccccatctgtattatgagctaccatacattgaatattatgtatctcagttgcttggtgttaattaaaatacaacatgattctaaaaagtccataatataaaggcataaataaatctcagaaccaagtttagacaagcctcatgttactggttcagcacactcttcgttcttaaccccaaatttctcaactatattatgggaataactatagtatgggtgatgaggatacaattgaaaatatgcattaaatgcatttatcagggtttttttttaagattttttatttattattatatgtaagtacactgtagctgtcttcagactccccagaagagggagtcagatcttgttacggatggttgtgagccaccatgtggttgctgggatttgaactctggaccttcggaagagcagtcgggtgctcttacccactgagccatctcaccagccccagggtttttttttttttttttttttttttttttttttatatacttctaaatgtttgttaaaggatttgtctcctactgccccctttcttcgtggatttttagacagggtttcattatatagtgctggttggcttagaacttaatatgtagatgtcccaggactctaaatggcaatgaggtaatcttcctatatctgcttccaagtggtgaaactacatacatgatcacaatccctcccaaattatgttttcttataaaagcactgtgaaataaagactagatgtttgtctaaagaagaaaaggagattaagaaaagtgactaagtggttattttttaatgacaaaggaaaagggcattagaaattgagtttccaaatttaggatgatgtaattcaagatttgtcctttgtaagtttgtagttttgacagcaaaatctataggatcgatggcattgttgctttcatcttgaacatctgatttgtgttcatacatattagacttttttacgtcactgatgagctgcaccttgttattagcaattagctactcaggaaatgaaagaggaaaaatagctatgaagaactgaagcagaaataaacgaaaagtcctacaagcctatggaagtcaggcacagtctgacccagctgttcacaactctacagggacctcagtcctttttgggtagacttcccacatgcaccattctcatttgggggcatttggcttccactttttcaaccactcattgaaagatccacatgtgtgtcccatcattcacagacatcttaaggtctctattcacaggctagcacagccctattggagaaataatttaatcacaaatgggggtttctatcccgtctttgatcatttagttctacttccctgccaataaccccacatatgacttaccatattctgcctggctgctcttaactccaattggccagccatcatggtcatgttttcatgactcatctactccatggcttactctcctatctcctacttctttttctcatggtcctcctcagagcctaagccaggaaactgaaaacttcacctacctctcttatgcccagccatagctcgtccacatctttattcaaccaatagttttaaattaatgtgcaaggtcacatagcatcacttgctgtataagagcattctcttgttcttgactcaaaaataggcagtatttagcattgtaacacatagcaacagaccaagactcaacaattcccctttagtttaaataaaaaggctctttctgttataatactatgccatattattcatgggctgctcttaaattgaattgagtaaactcccaggatgaatatggcaagttatatttctgggttattggcagggaagtagagataatagcataaagggtaggtatctgcccagctctaatgcataaggcttatcataagtataaaaggttttgggtctcttagctgggaaatgaataatcaaagctgggttagaaatcccgattgatattaaataattcctacatcaccactcatatgcccactcatagactagtgcttgcttgaaaggaatagaattaaaagtcaagaacatccgtcacttaaaactgaggaccaataacagatgcaagaaggtaatataggcaattttacgaatcacaatttgtatacttggagagaaaaactatcatccatatctatgtcatatccagtagttcagaaggggattatacactggcacttcatactctaagtaactcatactctaccatactagaggtattagttatgttgatacttatctgagatgctatattttacataggtattgaaatttactatctgtctcaagaactgaaaatcatctgtgcccatgagttttgaagaaccacttcatctacgtcaatgtttcctttgcactgttcctctcgtccttaggaacagatatgtactcggggagactgtggtggggggagggaaatgccggcttatttgaaagatgaggaaattaaaacaagaacaaaagatccctggagatgtcctttaaatctcaaacacccacacttctggttagctgcattaaccatgcttctctcagctttgatttaatgtaatttgctagcacatagagttgtggcactcacttgccctttccttgagatcttcattttccttacccaggcttgatattccaaataacatgccacagtttcctttgcctcttcactgaaaagagggaactgtacttacattcaaataactgtttagcagtttctctgaaaacaagaggttgcttatcaagtacaaagacagcagcattactttttgtaggcttgcatgtgtttaaagaaaaaaaaaaacaagattacttttttgtacttgaattccatgctgagaacactacggtgcaatgatatgcttcaagcaaagtttgtatgtgtcttcgaaaggttctcagacagacaaaaaaatatgaggtaggttttttcattattattgtagaacaataaagattgccatttgcattccatcttaaagttgccatgccaatgggttattatatgtgatttttgtcagtttgtctttagaacagcagcattaatgctaagaagaaaatcaatagtatatgctaattattaagtgattatgaagtgcattctaaatggtttgtcttctataaacattgagtttacaggtaaataagattatagttttcaaaggacaggaaagggaagtttagctaggctcagtcacttttcgtatcatagagttaatgaatgtaaaaaaattactgttccagtcaaccctgatgatttctctgctagccactttgtcctagtatgacattacattactaaatatatgccaatttgggagctgtagagatgacttgaagttaagagcactggctgctcttgtagaggatctgggtccaatccccaggaccgacatgacaactcacaaccatctgtaactccagtcctgtggaatcaaaaccctgttgtggcttagagtgcatcaggtacccatgtagtacacagataatcacatcaggaaacagacacatttaataataaaatagattttacaaatatcttgtcatttgatttctccaaacttaaatcaagatatcaaagactgatagccattttatttgccattttgcttttaattttttattagatattttcttcatttacatttcaaatactattctaaaaattccctataccctccctcccccccgccctgctccccaacccacccactactgcttcatggccctggcattcacctgtaatggggcatatgatcttcacaagaccaagggagatttcctcccattgatggccaactaggccatcctctgctacatatgcagctagagacacagttctgcgggtggaggatactggtgagttcatattgttgatcctcctgtagggtttcagacatctttagctccttggttacttttctagctccttcattaggggccctgtgttccatccaatagatgactgtgagcatccacttctgtatttgccaggcactggcatagcctctcaatagatagctatatcagggtcctgtcagctaaatcttgctggcatatgctgtctgggtttggtggttgtatatgggatggatctctaggtggggcagtctctggatggtccttccttctgtctcagctccgaactttgtctcggtaactccctccatgggtattttgttccccattctaagaaggaacaaagtatccacactttggtcttccttcttcttgagtttcatgtgttttgcaaattgtatcttgagtagtctaagttactgggttaatatcagtgagttgcttttaatttttattattttattttagggacattttgagctttgacagtttgttacagtgttttgcagtatctgttttcttgacagctctggatattcacaagtaatgattatgctacactgctttaaacatattgaccactgaagatgagaagataactacacctgaaccccaagagtattgcatgaaccccagttacttgtcttgccctagtaacagtgaataaaacttcatactgtcgtgattcctgacaactaagcttctaaaaatctgcacagatattaattagtactaatttatatctaatatctctttcatgaagttaaaagggctctccttttgaggttctatgagcagttgattgttttgatggagtgtgggcagttagttttaaggatgtgtaggtctaccagcctccagtgtatgtctccatacccaggagtatatgaacagtaagaccaaagtacagaaattattaaattatattattaaattaattattaattgaaataaaaataaaagacatgaagttgaaagggtaaggagtgagaggatctgtgagtaatatacattatatttttatctagatatgattattttattttatgtccatgagtgtttgcctccatatgagcagattgtatgaatgtgtatgagtgtgtacatgtgcatgtgtgtgtgtaccatgtgtgtatgtgctgcctgcagagattagaagagggtgtcagttccatcagacctggagtaacagagagtggtgagccactataaatataggtgctgaaaattgaacccaggccctatgtaagagcaggtgtttataaacacagagaaaacactatcgtttaatgaaattattaaacaattgataaaatattttaagcattctaaaggagatatgtggtgataatgctagtcacaaacctagtagcacaaacatatctttatgttagtagcacaagtactttttgtctcagttatcagagcacacttatttgtgtaaagaaggaggatatattgttctaaaggccttaaggaattgtattcctttcctatttggatggtacatgagagaggcaggaaagcaccaggttactgtttttacaaagacagtactaaatgaagttaccattctcggctacctagaagctgaaccagatggaagcaatgctttcaatcagcccagactcctctagggtatcactctctattttgcctaagatgcagacactgcaacagcaggggagacaggctcagcatggcaggactgcaggatctaaggacacaaacacttgctcacttacacacacacacacacaacctggttccccatgcctttatctcagtgtcctaaattcctcatgtcttctgaagacatatgccacttcatcttcctctgctgttcaaaattcaagagaaaagactgcacattgaggccataagctatggatttaggtcatggtgtgacagtacgcaattattctcattccctactatatatctgacccaaaaagcccctctgaagaggatataaagtgactgtaatatcagtttggcttttgatccccaattctaaaggttttaaaaacagatggtagaggcttactgcggctgctcactattctatgctatctgaaacattgcttcttgtcccttcaggcaggcaagccagaatggaatcttgcttcctgttggctgtagaatatgcccctttcctatcctgatttgagcatttaacacttatcaggtccagatcactataatcaccccttgatttgcccttctcctcccagttatttatcctccaaaagcactgcttttgtgctgagctcctactagctaaccctcacttgtgaaatagattccagaccctgaaacctggcgttcttccaaaaacctttgtatctcggctcttcttccttcaaacaatctagtaagtattcttggctgtgctataatgcctttgtcctggtttgtgtgttctctttttctgcaggctcattatttgtgtctcttcatgaaatatatgggctttctgagcctagtccttgggcctaatttcttggtactcactatcatccagtcatatacagctatgaatataattacatatttaatatgtatccgtattatgtatatgtcttatctgactcacaatacaaaaataaattctgttctgcttgtaactactgatcttaaaagtgttataatgggccagagagttggctcagtggttaagagacctgactgcccttataataaactccagttccattcccatcacccatatggtgactcctaaccctctaaatctccagttcctggggacctaatgtcctattcagaactctgtaagcaccagatatacaaaatatgtatatgtatatgtatatgtatatatatatatatatatatatatatatatatatatatacaaacatatatatatatatacaaacactggcaaaatattcatatatatagtatagtatcaataaatctgaaaaaattaaaattaaatgcaagcagtgtttgggcttttattaggttttctttaactattttaaagagaatctaattggacccatgcaactttattttctgtggcataaccacacagttatgtatcacttctgataaaaaaacaactctgtggagaagcttactttgaccctgtttataaaagagccatgcaaacatgagaaattccaacagcagcttcatcaacagtgcagtattctgcgtccattggccaagccgtattctaataattactagttaaaagatggtgtgttggtggatctagtgtgttgtgttcattagaagtcgatggcttttgttattctaaaattatgtctgtgcttaccaaaataactgatcactcatgcagacagatttttcttttaactgttctttttgttagtgttctaagatgaagatggagctgtaagtcttaatgttttcaaaattctgcctgtgtatattattctgatatagcacagtggttcttgataaaactcactctcccaaagaggacagataaaattcatactaacaagtagaagaaaaacctcagaatcacacctgtttcccacgatattaaacagattaaaaaactggccttttccccaactttactgagtaatttttgacagtaaataatattacgtatactttaaattttccaccacatgttattacctgacccaataaataccagaaactgatgatgaacatgagccacgtctaacactctttgttgaaaatgttgagcaggtaggtgtgagtaaaacaggaagtgtgagcttatttcttccaagcttccttagtagcctggctacagcagccatttcctgatgctgaattttgttgtcacatggagcttagaatattgctgctggctgcccacaagactctaagcaagttgccattctttcttagagcctttgtttctgtaaaatgaagaatttgattcagagtattgctctccaatattccctttagctctctcagagtcagaggcatttcatagacctattttcagataatgggtctatcttggccatggagaatggaaattcattctcttgctcgccttctcgtaaattccagatggcttatttcttttctttacatctctggcctttcctctgtctctctatcatgcttataaaatatattcattctctcttctgtctatgtctggctaagtctttggccatttcacagttgcctttgtgtgtgtgcatgtgaggctattccgcagggtaagcacttaattttagactcgcttccactaattaactacgaaattaagtaggtgaattcattgattcggcacttggtttgatgtttatattaactcattaaaggggaagccctggatgtggccagaggcttgacgggaatcccccctcacttgttatgcccctgaacactcctctgacttcccacactgcatatctatcttgctatttctcagaagtattcatgtgtctggggagcagccaaatgagcaagctgcatcctccaggaactgtatcctttgtgaccacagaaacaatcattccttgctctgctccttcccaggcattctgaacacaactccagttttatttttgatacacctgaagaattctcagcggatgtaaagagattaaagtgataggctttcaatattagattctcccacagcctctgccctcatgcccacctcaggaggaaataggtctatatacctagatgaaattttctccttgtttttattagaaagaatgtagatgaagagcagtcaggggctgagcatgccacaccgaagcctttgccttgtttttctagaaaatttaatttggggtttatggtaatgactccttctcatggttttgtcctttgctttgggaaatagaaaccaccacaaatgtgtcaacagtggctatgcaatgtacaatcatgttttcatttttaagggcatgggtatttttttatttatataaagatctatggcttctctcaattccctacaaatactatgcaactcacaaaacatgttttgtggtaaaatagaatgtttggtaatggagcaatgatcatttttaaagagacctttcagtagaacctactcaagcattctgtgacttgtctaaaatagcttagcaaaaaatgcaagtgtaggagtatatgcatgtgttaatattttctctacctcttacatgttattcttaagttaaaatgtgttaaatgcaattaccttaagacaccttcaatcctgttactgaattattgtgctgagatactttgatttcatttttctctcattgcaccaataatctgtcattcacttcaccccacccaagctctccatgaataaacctatccaggtgtttttaacacattttcatagctacttaagtttattatctatctttgcccaggattctgtgctctgtgtacatatgaagccaaatatattcttccctgtgaacttctttggtgggtcatagttgttcaatacactttttatgaatctgaaaaatataaatatttatccaagatgacgcattcttcaaagtgacttgtgtttcaaactttaaacaaacaaagagggagaattttgatttactgttaaaaaatatgttcttttcggttgtaattcactagcagctatacagccataggatcctttttctttcttcctctctctctctctctctctctctctctctctctctctctccctctctctctcttctctcttctgtctctcttctctcttctctctctctctctctctctctctctctctctctctctctctctctctcttctgtctctcttctctcttctctctctnnnnnnnnnnnnnnnnnnnncttctctctctctctctctctctctctctctctctctctctttctcttcctccctccctccttccctctctctcactcactccctccctccatcccatcccttccttccttctttcatttctatttcatttttttcttttttctttccttggagatcttattcctgaaaaatatagtaaaatttatacaaattttgcttttaccatttcatatatttaatttgtcagatatttcatatattgccaagacccctgtctgtggatcttgcttccaggcttagtaattttagaatagcttttcatggagtctccacagatttagaagtcagttatacctttcctaagtatttgaatcatatgtttgatacaattgttaaatgaaaagttggattgcattatgctctcatcataaaacctatattcttcttttagtacataaggttgaaacttctgtatctcatatttgtggaaaagtttgatttctttaggccatagcagaaaaatatttatcattatcataaaatgaccaccaaataattcttctctaataaaagtttcaacatattttctcattgtctactgcattccccatgtaccttctacttaaggccagtctttcagttgttaaaatcgaatagtatctttgcttagttcctatgcaatgtaaagacttttcattgtattaggcagctctgaattgatgtgtcatcctgatgcctcccgtgatattttacagtactgaactttagatagaacattctacaacagggcagaaagctagcccagttataatcgcataatgatgctatgagtgggagaggatataagttgtgggtttacagatctttgttcttattttgttatgccatagaatgtgatcggatacaatgttactataagtcccatagttctagcttatggtgattaagtggatccattcattctcactgagttcatgccatccatgaaagataaccacactgatgcccatgtgctattaacattgccaatgagggtctacatctggggctaacagaataaaggactagggtgtcatcctacattggaagatttagccatgagcaggaaagcatcaaggcacttcatgtggcaggaatagtccagatcttacagtcatgaaagctatttcctgagagctggatagccagggtctcaggatactcgtgtattttagttccctgcaactagttaaatggttgttgtatggcctgtttactactataaaattctgatagctttaaaattgttcctccttagtaagatgaaaaatggaatgttcattcttcccctttgtgtctattgattgagggacattaacccagctgtagttttcccttatgttttatgaaatcatttgtgccgtgattcccttctttgggtttctctttaccacttacatttgtttattcattcattggattgtttggtttcctctgaggacaatttctgaagattgcttctttcctttcaccatacggaatttgggttgtcaggcttgacattaccttgatgagcctatacctatacctgatgagccaccttgttggccccacaccatgttctgacggattccagtaaaggcaagaaaacacacacacacacacacacacacacacacacacacacacacacacacacactgttaataaagatgaatgtgcatattataggcaaagcccttgattggagcttcactactggcagaagtggtgaggaggagcattggataaaaacttgttgagcctaatgttatacatcagacctgtaatcctactttcaggaggctgaggctgaaggactgctacaaacttgagggcaacctgggctggagtttggactgtgtctcaaccaaatgaaagaaaaccctatcacttgggaggtagaaacagtaagctcaggagttaaggtcattgtgggctacatagtttgagactaatcaggtatacatagccaagaaaaaaattaaagccagatagaactccagaggaaaaggcaggtatatctgagttcaaggctggcttgatctacagactgagttccagaacagccaagtgtacacagaaaaaccctgtctcaaaatagataaataaataaataaataaataaataaataggaatgaaagaaagagagaaagagaaaaaacccacaaaaacgtctttttaaaaagaaatttaatgtatttaaagttacaaaaaagaaattaaatgagaacacttttgagacaccagttccatgagtgtgatttgattagaatcatttttgttttaaattagatattttatgtatttataatttaatgttacccctttcttgatttcccctccagaaactccctatcccatcccctgcatctatgagggtgtttccccacccactcatccactcccacatcaacaccctggggaatggagccttcacaaggcaagcacctctcctcccactgatgccagacaatgccatcctgtaggacacatgaagctagagccatgggtccctccatgtgtactccttggttggtggtttagtccctggaaactctgggaactctggttggttgatattgttgttatgcctatgggattgaaaaccccttctgctccttcggtcctttctctaattcctccattggggtccctttggacagcccaatggttccctgtgagcatctgcatctgtatttgtcaggctctggcatagcctctcaggagaaagctatatcaggctcctgccagcatgcacttcttggcatccacaatagtgtctaggtttggtgagtgtatatgggatggaactccagggtggagcagtctctgtatgtcctttccttcagtctcctgttcatactttgtcctcccccccccatacttttttctcttccttcgttccttccttcgttccttccttcctccctccctctccctctccctctccnnnnnnnnnnnnnnnnnnnntctctctccatctctctccatctctctctctctctcactattttctttagacagaggtattctgggttaaaaaattggagatgagtgagtggccccatctcccaacctgggatcttgcctaacctctgtctatggtctctacaggttctttctcacttttgttgggtatttcagctaatctcagccctgttgggttctgggagcttcttgctttcctggcatctgggacttgctggtggctactgccaattccccaccccacattgctaaatacctctgttgaaattcctgcccctttgaatattatgtctcctctcatatctgatcctgccagccttctcctcctcctcctcctcctcctttcttcctcccaagcccctcccacactctacctctcatgagtattttgttccccattctaagaaggactcaagcatccacattttgatcttcattcttcttgagcttcatatggtctctgaattgtattgtgggtgttccaagcttttgggctaattaatatccacttatcaatgagtgcatagcatgtgtgttcttttgtcactgggttacctcactcagaatgatattttctagttccatccaattttctgagaatttcatgaagtaattgtttttaatagatgtgtagtactccattgtgtgattatactacatttttttgtatccactcctctgttgaaggagtggtatacctgggtcttcaggtcgtactatgtccagttttctgaggaaccaccagactgattttcagaatggttgtaccagcttgcaatcccaccagcaatggaggagtgttcctctttctccaatcctcgccagcacctgatgtcacctgggttttttatctttaccattctgactggtgtaaggtggagtctcagggttgttttcatttgcaattccctgatgactaaggatgttgaacatttctttagttgcttcatgtccattcaatattcctagttgagaattcttggtttagctctgtacccccccccttttttccccgagacagggttctctgtatagccctggctgtcctggaactcactttgtagaccaggctggcctcgaactcagagatttgcctgcctctgcctcccaagtgctgggattaaaggcatgcgccaccactgcctggcttccgtaccccattttaaatagggttacttggttctatgtagtttaacttttttagttctttgtatatattggatattagccctctatcagatgtaagattcgtatcgaacttttcccaatctgttggttgctgttctttggaatgcttaaaggaatgtgtgactaggatttggtttgtttagccaagtgcataccaggaaaacacaagaacctgagtttgatccaagaacctacaaagtgtttggccggtagtgcttaactatatccctagtactgagatgatggtgactgaatgatcctaagagctctctgccttgcaagttcggctgacttggtgagctccagcctcaatgagaattctaactatctctaaaaaaaagagtgagaagaatgattgaggaagaccccagaaactgacttatagtgtgcaatcatgtgtgtgcatatgtgtgttcacacacactcatacaaacacacaaacacacgcacacaagcacacacactggagaaagaaagtaaggcaggggaaacaacaaacttttaatacatgaagaatttcaagtttctgatctactagaagagaatgcagtgctggttctggaatggctggctagttgcttttcttgtgtaggatctatggcatgacctctgagggggaaataatcattccacagtggttgcatatcatatatcttacatatcagacatttacgttgtaatacaaaaaagtagcaaaattagagttacgaagtagtaatggaaggaattatatatttgctggtcatgacaacatgagaaactgtttaaagggtcacagcatgaggaaagttgaaaagcactattacactatgctagttgaaaaagatttatgttgacttattgctattgcttttcaacttttggaacatcactaatctttttaatttcaacttttgtagaagaacattccttttaaatatcataatctaagattgtatataaaacacagagcttttaaagtaccaatattagtttcttccattagagaataaaagctgcaccaaaatttataagttaagatacagagatggattatacttctaagtatgttttcaaaatctccacaagggagcctgaataatgtacaggctatgttgaacatcatggagtttaatagattctctattaaatagagtccaaaactgccatgaattaatgtcatatttttagctgttccttgaaaattatttgtggctaatttctttcccagtgtcagtttgatgtacaaattctaaaaatatctctaagtgtcatgtctttttttttaatataaagaataaatgttcatatgtttatagtttcaataattacaacttttttcatttaaatgtttagcacattgagagaaaattattttcaagaacattggagttctttatagtcttatgtacttttttattcttctcattgttacaggaatccatttaagaaaaaaataattatttgtcttatagattaagggagatgccatttagtatatagtaaataagatacagcaacaggaatacgaaatggttggtcacatccatcttcctgacttgtgtctacagtcagaaagcagaaaagaaccaggaagcaagtctggatcctcctctaatgacttattttctctatccaaactctaccttttaagggttctacatcctttcaaaatgacacctaaatagaacaagctcccaaatacatgaatctatggggtaatatttcatatttaaacactagtattatatacgtatgaaggcacatgcagtaaattcccaatattagaaagaattttatctgtagccaattctttagtttatagatatgatggcttttgaataatgttttggaataaaagctccatggtgcaagttgggatgactttgtatctcaggctgaattgtcttggttggtaatggtcaatatcattagttgtttattgtagcatgaaacaaaacaaaagcatacaatagggaatttcttatggcagtaaccaaataaagggaaaaattgagttttaaagattttgccacctcaaaagataatgcttaaagtctccatagtactggaaacaagagactgttgctttttcttatgctgtgagggaatgtgctgtgacaaaggtataagggactcattgacttaggagctctctggcattctcataaagattggatttcctcctcttcatcctttgctacccatgctgtctatatacaatttcatcttcagaataaaggaaaacacggaaaacataaaggttggaaacaagaaacttgtgaagcagaaagccagtaactgccaaatgttaaattcattcctatggagatgagtgagcctatcatggtgtgtagtatgagacctaatataatgttcataatggctcattctctctctacatttatttcctgtttacatgtgtacatttatttacagcaaaatcagtcctgaaggtcaagcctgaggcatgaccaaagtactatcagttttgcacatacaaatgcctctatatgtttctgctagctgactcacttaaacagatgtttcatatgtttgttgaaaatataacagcacttacagtcactgaaggagctcttacacatgtaaaaacaaactactgctaactcaaaccaaaacccagttaatttaggaggatcaattgaacttttattagaagctaagactacctatgacactaaaagtattaactttatcatatttcctaaatgcagattattctttccagaaacaaaatgaaaaaattctactcttcaaaattcttagtccccaaacccttaccatcttcagggaaagcacctgattaagataactgatatatgatagatgcctttcatgccactgaagaccaaaacagaatgacacttgatttaaaacaagacattgacagaaagaatagtagaactgttactaagtgtatgaatatatgtatgtgtgctctgatatacaaaagtcgatgattaatatagttaggaccaacttgaactaaatattgtcatcatcactgaccaactaaactccaatcttcacaacagaaataattgtctaatttcctcacttaatattatggtaagtaatctggtgttagtgattgttgtattaaggttttcataataagctggacatagtggcacacgctcttcatcccagctctcgggaggcagaggcaggcagatttctgagttcgaggccagcctggtctatagagtgagttccaggagagccagggctatacaaagaaaccctgtctcaaccctccctccaacccaaaaaaagattttcataataaatccacaaataataagtataaatattcttttgtctttctttttcattcatattacttagaataatacagaattcagtatagttatgaattctcatcatgccttgagatgtattggaacacaacatgactgtagctgtctatttccttctcctcttcctcctcttctctctattcttattctaatgagacacattgataaagtccatatttctactacaatatattaaccattgtatgaatgcagaaatgggccctctgtatatgttttaaatctgtcaaattctttcttctcatcctacaaacaaactgattatgtttggatatgccattgctcctgcagcaattcaaatcaacatgaattgagcagactcctagtaggaggattttaatgatttatttatgtatgcatataatccctccatcagatgcagactgcatactcctatgcctgagctgaattttattcatgtgtggacttgttgccaggctcttaattctgctgcccagattttaattcctgacaacacagttgtgccaagtggcaatgttagtgctgtaaggagttgaattttgcagaaatatttaatacctgctgtgtctatcctctggaaaagaagatagtccagtcttttaaatcagttggacttcagtggaaatgaaattttaaatttactttatatatttttatatttcaaagttgttaatcatacccagtaatgcctcttaaattaagtattaattaatacacaaaatggcccttattatgtcatttaatacatatagaccattgtttattacttactcatatcttattctctctcaacctaccctatcacttctctgtgttacctgctggtctccttcccccttagtgtacattttaatcacagacactgagtttgcagaagagataacaggattgttaggttatgcaggatttaggaagcagtgcagaattaaatccccctttaaaaatgtttaaagcccagataggcacttgaaaaattaagtttcccaacattatgtgtattctcaaagcacatttaaattacttctacggctgcaataataaaatgaaataggaaagtaccaacatgaaatacataaggcagagttaaagggcaaagtaatgagatcaatcaagccaagaagataatgagagacagaactaccaagcctacgctggagaacaggacactgatgggagcagatatttatagcacaatgaagaaatgttggtggaattttgcatgaggtgctatggggaggtagaaagagggaactttaattatgctctgtataaagggggttcaaaggacaagaagaatttattttaatctgtgttgccttcagagcaacagagttcgaagtaggacaaatcccacttgaacctttccttttaattgtgaagtatgaaatgatggcctttgctgtcaagtttggcgttgtgaaacaacacaaaacaatgtgtttctctttttctctgaagtagcttgttattcatatcatagatgtagaaacaggtaatctgtgtctgctgagattttataagtttccaaagggagaggcaggaaggagaaacctgaaaggagttctcatgagaggagacatgagaaatgcccgctctttcctagggctgggtagatagtgagaggaggctatctcaaatatcaagcataatttatcccaatgaagaaattactcttcttggcagcttttcccagggtaggtactagtggatacaaagaatgatcttagagggattcttctccaaatcaggttgcagacttgactccttaaaggagcttagatgcttatatcagggctcatgagcactccgccccgccccaacacacacacacacacacacacacgcacgcacacactttacagctttagagatatctcttctttctatattgaaactataagaattcaacctgacaatatgtggattcctcgctggccctcattgttcctcattgcattgcatatgaagcaagtaaaatgaatgagctgagagcatatatgttaaagaatttaaagatttcaacaagtattttttttaagtcaccttgaaactttttttaatcacaagttgaattaaaatagccttcaatttgggtatatgaaatatctgcatccagcctgatgatttttaaaaatgtgttttcagcaaataactactgttgtggtttctgtgaacttgagattgaattcacccctccccctaggaaaggagagggaagcctggtgttgctagggacacagtaatcattgtttctaagtgctggcttcttcagttgatagttaatatttaatgacagtttgctatatagcaatggcagttttaagtatctcatacagagttgttggaagaacagtaagctataaagatatgtacttacaaaagacaatagttacagcgaaacctagaagttcatttgtccccaggaataaaacagaagtagtggtgtggcaagggaagttggtgaaaaatgtattaactccatcatacatgtaacacttgtcaaccaatggtccagtttttttccctttcctctccttcccttcctccctcttgcttatcttccctctcttccttcctttcttccctccatccatccatttttcctcccttccttccttcttttcttccttcttttcttccttccttcctttgctccttccttcattccttcctttgctccttccttccttccttccttccttccttccttccttccttccttccttctttcctttcttccttgcttccttctgtccttccttcctcttcctctcattctttccttccttttttgaagtagtcttcttatatgaccttacttaattaataaaatttggccctaaatttgtaatcttttagctttggctcccaagaactaagaaaacaaccatgtacacccctgtaggatatcagggtccttcttttgtttagtcaattctgtctagtttgatcctctccggattactgttgcctttaaaaagtacatgtctcatgtgagactctaggacaaagagctccatttaaggaacagaacctggaggaagcatgccacattgacactcatattctccattccagatttttgtctttatgtatgcatggtccttgaaatttcatttctacataatctccttgcaattacacatatatgtaatgctctactgaggaatacctgatgtatcctcatctataggcaaaaataatcaagcataatgaattaatttctcttctaatagtgaaggctagcaatttcctccataagaaaggaaaatgtctcagtagcagctacagatattcttacctcttgctaataacattcttcccacaacatttctttttaaattttactgcgcacttaaaaagcatcattttattttattttgttgatcattgtatacacattgtgtattttctcattcttctaattctcttttcagatgcaggaagtcagttttaaaataataatagtagtatttgaaaataagaaagcagacaaatggcaaaggttggtattagttggcattttctttttgtatattattttccctggtaatttttttttgtaaaaatagtgttctctgatgtccccaacttctgtcaggaaagctccttgggtagatttcttttattttttacagtcctttcatctttgtgcagagtagaagactttttcaggttgaatatctaagaatactggctgggagaaaactactttgttcagttgtggctccaatattttactcataagatctgagactttgaataagtctggaattttattggccatcttttttgtaagatatataaaagtctgaatcaattttgagctgaaggatactttgtgtagtccatggtaaggatctgatgtagcttagtcttctcatcacctccatcatcttcatatggagttggttaatagtgatactattattactagcaatgatgtattagtcttacaagtgttgatttattgaaaagaagacacttggtccctacagtaacagagttctttttgttctttacttaatttggacatgaaataaagatcataaagtaataaagacttagtttgaggatttcactttttctccctcctattcagaatgtatttaggttaaactaaaatgtagtttttgacctcatagattaaatgtaagttaaaatgaattagactataacaaaggtattgagagtttgtttacttttgatagctgatcacaaaatgtgatttaatattttctctataggaagatttttcctaagttctatagtaaaatgataagaatacatgaaaggtatctatggatcttaaattctaatagtacaaattagactaatatgtaaaagaagttatattattcagcataatatgcatatgcattctactataattacagagttaaaataattgctattgttcaaatattatactgagaaaaatgatattcaataggatttggaggaactagaaagtctagaaaaaagttttctaaggtaaaattgctttttattgcacaaactctcacgtctcatgcaaggtcataagaaatttgagaatgtgttccagttagctttaaaagcagaaacttgtgcaatcagtatacaattttacatgtgcagatgtttatggaagtcaaagatgaattgagatactgtgatacatttacagatgaaacattttattcagtattacttcaagagacatgaacactactgtgttctttgaagatacagaatgtttacactatcattctacaaggtttgaaggtgtaattatattaaagatacgctgctcttccagagccaagtgtaaccagtgataggtatctctgttgtttcttgaaaagtaaaggtattgattttcatgtaagaaagttaatggggaaagtgtctctggtgtatcttcacagcagtgacatgagggtgtaccattttttcttggttactctgcatctgacatttttttgtctttaggatttacttacatgattttcagaggctatataataaacaaaaagaaaacaaaacaaaaataagaaacaaagaaacagcaaaaacctctgttcttttgcaataagtggacctgtgaagaaatagaacttccctccttaatccccttttatgtttaactggctagaaaattatactcaaacaaatctttagggaaagaaatacaacagtcacgattatcattggtgagtgaggtgttgcaattccctgcttcatcaaagccttttccaaatacttgacaacatgaaagaggatagacttgtacataaaactggagtttgtcgagtatttggagaatatagagatgggaatataattatttttattcattaatactgtatcacacttgacacatagtaaatgatgtttgcctttgtgactttatattcaatataaaataaatttcttgaattcttatatttatggaagagagaataggaagagaaagggtaggatgaaaagatacacacacagattcagagaggggatagagagagagagagagagagagagagagagagagagagagagagagagagaggaaagagagaggagagagagggagagagagagagattttagacagtagatatttctggtttttgttttttttttttttttttttttttttggtcaagtctagatagcacagaatgaacatgtcaatagaccaagcattagaattatattgtgagaaactgattaaaattgggtggcactgtttctttcttggcatgataccaacttatttcagtaatgtattaaatagccctttgaaacacaggagccaaaaaacaatgtcctttggaactaacacttttcaagagtttccaaattaatggaaagtgcctgcattaatgaaataaaacatcaagactttggcaggagctgattggcagaaatacccagtcgcttgatgcatctgtctcctgaagacacaaatgggtttctccttgtaaaagagaatgaaaaagtggggctgatgctaaagcacaagtctagagaaaaatgacttcctatattttgccagagaaagcacattttttattctgatatctttgtgccaactaaattgatatcatggttctaaaaaagaatagtatattcacagtcacaggcactatacccttaatattcagttaaacaataaatgaaaagatgttgaaggaatgtggtatcctcctacttttttgtttctttattttttatgaggacaatctctaaattcactggtttcatttatttatttttttgaaactagattctttactcatacaaaatactgtggttctagttttcctttcttctatttctcccagttagttcctccccatctcccaccactggattgactccatttctgtctctcacttaaaattaatagatttctgacaaccaagtgtgataaaataaaatataagatgaagcaaaaactatcatattgaagttgcacagagcaattcaaattcagaaagagtcccaggcgcaggcaaaagagtcagggactgatattttctcatagtcagtggtcccatcaatttctgagttaatagatgctatgcagagggacaggtataatcccatgctggccatgttcttgttgtttcagtctccaagagctcatatgagccttttttaatggactcagaaggccttatcctcctgatgtgctctatcccctcagacacgtataatctttccaattcctcttctgcaggatttcccgagacctgaggggtagaatatgatagaaatttccaatgtagactatctcttcatataatgtttgactgtgagcctctgtttctgttttcatctgctgccagagatatcaagatatatgtaccagtgtttacagcaatgcctgggcagtatttaattttattaaccctttaagctaatctggctacttctcagtcatgatcccatgattcttgcatattattattgatctgcttctttgggattgacttgttttttgtttttgtttttgttttctcactgtgtcttcttggaacctctcctcatactggctgattagaatctcctttcttctctttctctcaccttactagcagaagtttccactctattttctctactacctagccatttggcagagaataaatggtaagaattgtttgcaggaacttgagacaggacactctagacataagcattaaaatgctgtgttctgattgaaacaagatatgagggagagaagtcagcatttgggtaacacaaagatgaggtttccaatgtgcacaagaacaaatatggaccagtccgaattcttctacatgcagacgtgcagtttgactagcaccatttttgaatatactgtctttatttcaaagtgtatttattcctctgttatttaatacattcaggtgttagtatgtttttggaattatgtctgggtctttaaattgattccattgaaaaatatatatgtttttgtgctgattccatgcaaattttattgctataactctgtagaatatgagattttgtttgtttgcttgctttattttcagtcttcttttttttttttcttttctgagacagggtttctacatgtatccttgatagtcctagaacttagtgtgtaaccaggctgtccttgaattcatagatatcctcccttctattacctccacagtggagtgcttggattgattaaacatgtactaacaccacctggcttatacttgaaatcagatatgatggtacttccaaatggtcgtatatatttcagaattgttaaaactagcctgggtgttttgttttttgcacatcaaattgagaattgttattttaatgtctacaaagagttgtgttgaaattttgatggggattgcattgaatctgtagattgctttcagtaggggaattaaatttggaggtggaggtttttgtgatctttaggagtggtgtgcatcagagtagaaaaagaaatcatagcaatttcctgctacagatctgggaattgcatgcctggaacagtataaagggtgtgggtctgccttcagcctacttgttgccttgggaagaggggagtttgtattaacagcggctgcctcgtgaagctggagtctgatacaaagcaacaagtgttgggcaggaagttaaaaggtgacagtttgtggaatccacatgagatgtgggcataggagagtggaggctgcagctggtgttctattgcagtgtgggaacaaggctgaggaactggtttagggaagtgatacagagaatagaccgtttgctggcagcctatttggttttctggctggtatcagttccatatctttcttcgagatgagtctggattcatgagttggggttgagtagttagtagatgggttcatatacaaggtttcacgtttgtgcattcatttatagattaatctgttcacttattcatattttcattcaattacttaagagttttttttttttttcttttttgagcattataagcattcaggtttgtgaagatgaaaggagggagtttgaggcatgcatcaggtaatgtaaggagcacaaactagcaagtctacatttttgatgactccgtaggactacacttacagccttcaggtcttgtaacggaatactgaggttctaagtttacatcaagtcaattcaatacggttataactattggtttcaaccttgttctataaactcagattttgatattccaggacagagatctttccactatgaagtgaattggtctctatcctaatcacagattcatcctgtctataagtacttagacaattctgctgtcaaaatcctaactctcttgaatttttcagtgtatttaaatcaatccaacacaattaagagaatcagacatctcaaaactgaagtcaattcgtagtgctaataaaaacctctgtgtttaagatattagaattttacccaaggaatgaataaatttactaagaggaaggacttcttctgcttcactagaagtaaaataaatgtacttgatatattaaatgtgttttctacagttatttttagctcctcttaaatgatttatgtttctcttatatagaatgaggatgatagaccaacaggctagttagaaataccagagataatttacaaaaccttttaaaattagctattactataccttcaaatatttaccagctcagtgactgacatacctaagctaggttcttctctttgcattgcatgatgagagagagagactggatcagaaaggccaagggtcttacagaaagttccattcctcaaaagcagattactgagctattttcctctttgtcttaacacaattttgactagctatactagctgttaattgaataggattatgtctcccatacattaaaaaaattcaggaattgtataatgttattaggtgtatttcatgtgccttgagtaggaaaatggtacatcagagtgctcagcagttttttgggtttttttttttgttgttgttgttgttgttgttttggctaagttgccagagaaatcactattgctaccaaatactcaaaattacatgggtaattgataatagactggtgccttaaaagccttcaaactgtttttcaaaataaacaattttctgtgtaagattagtatttcgcaacagttatagaatgccagctaacacaaatgctactgaataataaatgaaacgttcttctcttgtgtacacatgcacacactattcaacttgcttaatgcatgtgaaaaagaaatagctgtctgatcacgtctgagaatagtatgtcatgatcataatacaattttgaatttatatatacaaatttatactttcatgtcttttttgcatggagactataaaatatgggccaagatcagagacacatgaaactaattaacaattgttcaaggcttccaattcagtccttctattttgtgccttccactctcttggcctgtcaccaggtactttcagatgtcagtgctttaaacaccaaggaaacaaacagaaggagctcattttttttgtggttgtggtgaatactgtttcataactcttctattgtatagtcatagtctagaaaaagttttttatagaccttgtactcccttgtccagctgtagtctgaaaagtataagttcactaagttccatgaaagtcagtttttaaacactctttaaaaatgactaataataatgtatttcaccaaccctatcaacatgtcattaggattggtgatacaaactagagaaatggaaaattttctcaggtgctaactggcattttgctggtggtgtccctcaagatggagaacccaaccaagacccaaatgtcatatgcaaaattacagtaagtatcagaaatgtatatgtcttgatttgggggctgtgagcaaacagttgtttatacagcctagagataaagtccagagagtgggaattcatcctactcagtcatctgctttcaggcttactatataaggcatgtttttgttgttgttgttgttgctgttgtttctattggttacttgattggttggttgttttttagtaactaaaggtatacagtggaagcaaacattttgtattctaatgagtactttaaagtgataatacaacatacaggaatagagataaagatcattggcccacttggctaacatctgccaagccttggatttaatcactggtacagtataatggcaaacatggtgacaaatgcctaaagcctcagctcataggaagtagaggcaagaagaataaattattaaggttttttttttctcagatgcatagtgaccttgacagcagcctggagacagtggcactctttttctgaaaaaaatggaaatagtaataataataataataataataataataataataataataataacaataacaataaatatagccgggtgtggtggcacacacctttaatcccagcactcaaaaggcagaggcaggtggatttctggtctacaaagtgagtttcaggacagctagggctgcacagagaaaccctgtctcaaaaacccaaaataataataataataataataataataataataataataataataataaatatgacactataatatatagcatattatatacatcacaggtataaacttttgaattctcaaaacagtcaaatgacctgtcctactcatcttgtcacttaagaaagcaagatgaaagagctggtgacaaggtagagaagcagcctggggatgctgcattcactcactaacaatgccctagaccaaacaacaaacaaaaagacctagacatagaaggttaaatgactcatagaaggtcctgaacatggtttacgtcagagctcgggttctgatccaaaacagtgagtgggctgcagagcagcttgagagaataaattaataatgctcaaaccaaatctatgaagtttcttcacttatctttaaaacaaacaaacaaaaacgaacacatattcttccccatcctgtcagctaatgagatagtgtgcaacaatggatgctatttacactgacattagtatttgaccaacccaaatgatattttaggtacttactggtattttcatatcttaactagtagataatggaaataaagtggcattaatagcaagtccttcccctcttctagaaaataccataataagactcctcacaagatctttccatttcagcatcaactcaaaagccttccttgcctttgctagtatttatcataacaacagggaaaccaattaaagaagatctatttactttgtgtcctgactggaattctcttttagttagacctcagattttaaacaatgcttccgatctttaacttctttggatagaaatagcctggaatatttgaaagtagtaacaggaaagtatagatcaagaacctgtttagattacagctttgaaaacaaagatttctgaagccttaattaatctaataaggaattgctcctatctacataatttatagaagatttatataaaatcccttttgatttcaatgcttttctcatcaatattgtatgtattgaagcacttcactctggcgtcacatgcatctttgcacacattccattggtatgaacaggaaggagagtctaaagtctatttctcaaaaaaataattattaatgttttgtatatatgtttgtatatctacacaaaaatgcttttgcagagctagttatttataagcatgaatagtgacttgtattttagtacgtatattacagaaaccttccacctgctttgctttcacttttcatattctctccattgcaactctataggaattgtctactttgagtattaaaggtcagaggaacaagtaatattgatcttaggactacattcaaaagctgggcctttatatctttggcatcctgtccaattcagaccatctctgctctacaaagacatgtcaaataaaagcaaaatttagtaaatattctcagaaaggcatttttattttttttcttcccctgtaaacctaaatcaatacttgacctttccacattcttatcaagataatatggagtctgtcagttttgacttagagctgtggaatgtgtgtcaagatccacttgtcctatgagctctttcttcttttatggacacacatgtgtgttaggcatatatgtacatatgtatgcatatccatccatatatagatatagatagatatagatataaacacatatatatggatatatatgtttatatagatatacctatgtctattagatgtgatatgtatgtaagtaagaatgtcagatgtacatataggtgtgtgttaggtgagtaatgtgtttataaatatgtatctttctatatatacatatattatagaagatatatatgtatgaatgtatatatttaagtgtatgcatatgtatatacttctgttttagcaattgagtccataatcaataatatcttcccatcagtaaatgtgaatatgatttcatagattttacagtgcattaatttgtaccatcttcataaaaatacatatttatggatagataagtacataaaatataataataatattgctttagaaattaatagagtcaaatttttacagctagatgagagatctagtaaccaattacctgctaaccgggcactctaaggaaggtcttcctcacagtatacctaagaagcaggtcagttgttcctgaatctttgctgtgtcagaattactgcagcaaaaatagcaggaaatgacatggctgttggtgtacactaaggaacaccatcagcgcaaaggttgaagtcaattctttcaaattaatgcaccttattagagccaaggagttccttcagtttaacaggaataaaaggagacacattaatgcaaaacgagaaagtaaaaggcctggcttcgtgcttgtttcttatctcaggtatgcaggcctcttgacctctgaattaaatgtctcacacattcagctcttttttttttttttttccttttggttatttttattttcattggaacaaacttcttggatataaggttgggagaggagcatcaggaagtatgtatatttggaaatatctctgcaagttttcatctagttgcagatggtgtatagaagagtgggtgcaagggaaaccctgtgtcctctgggtcaccttcagttattgacttgacttgaatggagtctaggctgaattggcctcatctaacagaagttaaatgacaacatacaatgtcttagttgtcttcgtatttaatcacctcaaactcctcctctttataaaagacagaataacacattcctcatagtattataatgagaaaagcagagtccatttgtcaaaaactgaaatgatgtcaccaataagaaagtgtgcactggcatcaaggcctcctatttgcaagaatgattgacatctggttgtgagtgacctcctttctgagggcttacatggtgttgatcttacggaagaaaaaaaaaaaagaaagggttttatgactttaaacctacctaaacatgaaaagataaatctaccttgcttttagaattttaattaaaacttcaacttgggaaataacggaaggcatatggagccagttcagttctgaggtgaggcaaagcctttcatcacaagttggcatgaagatcacagtgagtctggctttcagtccaaataaatggagagctagtgtacagaagtcagcaagttcagacaactttaaactattttttttctgtgataaatgggatagagatgaataacttgtcaggaataaaggaaaagaatactacctgggattctttgtttaatcaaatcctttagatatgaaataaagcaaatatcatattttcataaatggacctttgtgcaaaaaaggatatttacaaaattcctttcatagtaagcactattgatatgatgtatttatgtatgtcacaatatctttaatattcttatgagtataacagcattaaatgttatggttctatatatgtgtattttgatgtgacatatatatctatacaattcatatgtacagatatatttgcatatgacaaatcatatataatatacaaattgcattatatatgtgtcaatgtagaaataattatattttctttcatacatacacaacaacacttttgggacttgctatgtaactaagctggctttgaaattatggtcttgattcattggcttcccaaatactgatgttgctgtcatgaacccctacacttggcttatccaaaattatttcctgccattttatttgatttcaaaacacgacataggtagcagttcccttttttacttttgactgaagtgtgaattttatagaaatgcatgtggggatgaaactaatctcactgccactttaactaggactgaattttttgggcttggtaactctaggttaatggggtcttaagatacagttattgtccttggttgcatttctgtcatattaagcatagtatttttactgagagaaagtttaccatatactctgggaacaatgtcacctctaagagacacatccatctcataaccaaggagtaatcactattattgggtggagggagatcaggaatgctgctaaacacctcatggtgcaggatacaacaacagaagcacacatctcatcataagcctggaagtcatttatgtagagttgaaaaaggctcatctacagaatatgacatgtggaatctgctgaaatccaggaatgtgggtgaaatgttagaataaatcaaagaaagacacactgggaactggaaaatggccatgtaagacatgtgacaaagcatactgtagcttgcccctgtgagcagaagacagactatgaagatactctgagcctgagtaaacacggaaagcaataaatttagaaaactcactaagtgacaaggctctcactttagctaccatgaaagtgatctttgagtcaaagttgattagtatgacctatacgaaatccattccccaagtgagttttactttgcaggcacaaaacctacagagaagggacatgaaaccattttctttgtcaattaatgcattaaagataaccccagagaaacaaaatgatgaagtaatgaacagcaaacattttctcttagattaattggcaaggggaagctcaaatttgaattctccacttctacttcagtatctcccaccatcttactatagtttttgtttctgttatgtctagtttctgtgttatgtgtctgtgaggtctgaatgctcctgattctgtctctcagaaagagctttgctctgtatttatttgaaaaacaggaaggcatgatatgaaaaaagaagagaagtttcttgagaattattttacagagttttacaaagaaagaaactatactaaaaaaaacaaacaaacaaacaaacaaaaaaaaactgactcagaacagcaaacaacactgaaacagatgttgttcacctatatccattgtcttagtcagtgtcagtgtttgacaacatgacaacaaaaactttttttcccttatgttttgttttgtttttcaagacatgttttctctgtataaccttgtctcttctggaactcactctatagaacaggctagcctcaaactcaaagagatctgcctgtttctctgcttctcagttgctgggagtaaagatgtgtgctaccatcacacagttcacaaaaacttttgaaaggaaaacatttcactggagttcacttacagtttcagaagtttagatcactttttggcatgacaaggaagcatggtgtcaaacaagaaaaacagtgatggagtggtaagtgagaattcaatatccagatctgtggacaacagaaagataaagatactgggcctggcttaagcatttgaaaccccaaagcccacctcaattgttatatttcctccaataagggcatacatgccacagctcctatctcctgtcaagttgaactaattcctaatacataaatgttcaaacatataagcctatgggggccatttctattcagagcagcacacgcatgtcactttcaacattgatgatagatactgtttgatagataaatttgttttaaaggtgctttcaagctgttggctatttacagcaagtggttatcattgcacattcatgtgcgcataaatgattctgtgttagaggaatgaaaaaatacataatttatgattgtgaaggtatgcattagtttttgttgtaaaggctggctacataggaaatctgaggcaaattcgattgctcccattgttatcttaaagtaaatttgaatttaaatagcattgtaagttgattagtgtcttctaatgtagcatgatcaaatcaagatactattattttcattgttttggatattaagacttctatgttctaaaaatcttccatagcttctcctctagctatttttaaaatgaataaaatagaacgttgggaccatctcattctttgagttggcctggagttgagctcacataggcttcctataattcttggaaatcctcctgcttcagccttaaattacaaatataaatgtgtgctaccatgacccgtgaacagataggacaacctgtacttttgtagactcggtgagccaaactgtcttcactgttgtcagagaagctattgagaaggaaacctgatttctgggagtaggaaacacagtagtttcccaagaatttaattaacaaaatgaaatgagtgtcttatacatcttagatacatcaggcaggtcttttgatatgtccatgagacagcagggatgtaatttttaaagatccatgtgtaagttcattaaaaatgagaaaaatgaaagcctcgagtagataaggttgaaataaaactatttagaatggagaaagctttccgtctcttgaatgactaaaagataaacgaacactccaccttgagaaatagtattactcatctcttgtggagcactgggctttgagtctctctgctgttgggtttaagtaggttcggatttgtttaaaaaaatcattaaagatattattatctttttatgaacataattattacagggtcttttactaaatatcttacccaggtataccttcatttgtaatggtaatattttaatttaaaatctattaatagttgagcatatcatattgaaacttcttgcttccatattttaaaaaagattaaaattaaagcatgttactttttctgattgccccttatgtaagcagtgatttgaaactttaaactagaattggttttaaaaaaaatcagcaagcatatttcactatgattgagtgaaaaaattcctctttgtggaagaaatagtaggggcaaggggaaaatcttgctccatttcctagtcctgctaagaggagatgaggcagctttcaccaaatgtagaaaaatgaatctgtcacacagatggtgtcattgagacatgtaaatgaaacactcacgatactatgtctagcatcccttatttaataagatgatgaagaagtaaaataaaaacttgcataattgattgaaaacaaaatatttttatgtaaatatatttatgttgaaactatatagattaatataattattctctttttccctgaccactgataagagtgaatggttaaaaatctgtgatgtaaatattagtatgtaaacatgtactaataattttcaaagactaaaattggacttttaatagtgacaataattagcaaataaaagcagtcagattgtaggttagtaagaacagcaaaataggctgcatgtactcaacactggccctcaagcacaatgggaactgtagtattttatttaatattaaaacaaccccatgaaagagacttttgttctacagctgaggaaaaataatcttaacaatagtctgatttaattctttctgtcaaagatggtgatgcaataaatttggtgtttggcaaactggcaatttatagacagtgaaatagattgtaaggtggatggtaggcttatatattttgaaaatagaaacaaatattccagtcattgttaggtattttgctttttaccttcctcccccaagtttcttacatgttgttctcctagaagttgaaagtcatccaatctattaccaaagaagcaagtttagtattttgcagtctatctatacctagccattgagtatgtcactgctgcaaagttatgtggatttttataacaattaaacaacaaggacatatttatcaactggcagtggcaacacactggacttaggtaaaagtatccttcaaatgtctttggttctaatacagcatggcaacacatggaatgatatgttacttacagtgctcatagtaaggatgggtgaaattggcatggatgagaattaagttacagaactgtagaagaaaatacatgccttaagggaccttaggatttcccaaatttcccaagattgctgtagatctgataacttttatgctaatattgatatggttgattaatcaagattgttaccaaaaaagtttcacaaagaagaatctgataaagaatgagctgttcagttgctgggtaactctttagaaactagtcaacattgttgtgctggttttgaccttgtgttcattagccagtggttggaaatacagttattccagcaaaagtatttaaaaatataaaagtatagtggaatgtacctatctctagcactatttacatgctaatagtgaatacttttcaggcaaattctatatgtttctcatggtccactcagatatacagtgttagtcacaaaggtttttccctttcaagaatctaatacattcatcactgggattatatttagcacttaaatagtatcatagcttagcttttagaaacaaacttttacttatgagtctctggtacgtaactggatattaaacttctagccattcaacttttgttaatcacagctccagttcttttcacatgatatatgcaaatttaataattggttaatagataaaagttttctgtgtgtatctagaacataattaaattagcagttgttaagttctcatactttcccatggtgttaacaattaacacattctgccaattactgtagctatttatgtgcttggcacctcctcagctatattttcaaaatatttgttgcagatagcaacatctacttagaaaattcagagccctgtaccaaagaacagcatgtacttaacagatattaaatatttgtcaagagaagatttacatatttagaaaatgtacatatgaattgtatatagtaagcccaacccagaatgagaagctagaaactgaatgaatgagtctctaagtctctaatgagtccctatatggcaagcatgcttaaattattttctccttgcagaaatcagttttctcaggaataatagacagtgtttcaaactgaagaatagtttttttcttatttttatgttcaaggtgggctcttcatgtgtagcaaaacggattaatcattttcttaagtaataatggatatttaaagtgcatttccttaagatgctttaaaaagaaatgtttcattgctaaagttgtatgaaataaactgatgtagactacagtgttgaagttcatcttttaaaaatcaatttaatacataccacttaaaagttcatcttgctgactctgtattaccttgcaagaaatgaacaaagtgttctgttgtttcaaaaactacatccaaacaaatcggaattaatttcatagaaaatgctgaggcattgttagctaattgtaaaggcattgaacagtgtgaggggttataggcaaagacaaaagtgggtggacatttgccatgttttcagtgaggagtttcaaaaaaatatttttttcagaatgtaatgactcatcatacctctttccaatacatattatttattttaaagagagtcatactaaaaacagtctttaaaaactagtaagttttcaatgtttgattgggtattacagatttgagttactctcccaggcattatatcaagaggtcaggggaaatttagtggttcgattattctcctggaatggaggaattgctattgattgttgaaattttaaaatgttcttcttacttttaaattttaaggtatttgtcctgtaaatgttagttatgtccaactcaaattttctctgtcatacattcatgtattttgtttttatttttgtttctcttttaactaattttattttatgaccattgtttacaagttgactaagccctgaagttgttagtagaatgacttgcattttcatgtcatttttttttttaagattaatgcagcaatagcgtcctaagttttaaaacgatgtaaccataaagggttgaggacaacactcttcagacttgctctacaataaataaaatgaagatgatgatgaaacagaagaaaataataataaatgataaatgtcaatacttatgagagtaatgacataattgtatattagttctctacaactaacagaataagagatttaaagtcatttatttatcataaatttagtctcatatattcaatatttctttcagaactggattattagtaggggcaggtatcaggatcattttttccacaaatatagggcctgattattaatttttttagagaaaatttctctatcttccctgtcctggaatttactctgtagaccaagctgaccttgaactcagagatctacctgcttctgcttcctaagtgctgggattaaaggcctgcaccagtacagcccagctatcctgatttataccttatgaatttgtcatttccaccattctctcccaaaacagcaaaacaataaactaagcactgattggtgttttgtctccctaacagaagaaaatatcaatgataagaagaaggtggaatttttacattctagtattctacattaggtagtacagtaaagctgaaaggggcataaatgtatttaaagcttaagaaattttcatgaccaagcctacaagattgaatttgtcatttgtattatgtgaacagactctttgtttgttaacataatgaaattgtaataagagggaaaaaaaaaaagatttcacaaaagcccagccgaaggcagacagctgattaaaagatgaaaacatgtgcatctccctggagcctggacttcctttataagtagatttttagtgacttctcaagtcagggagttttctagaaggaaatggatgtttgtctggggttaggttaagggttagattcccagggctccagtgaacttgtagaagaaattactgaggcgaagcccagataagctcagagctactagaaagcgtgagatttactgtccttctgggccgactgctgagcagaacgcatgcacagtagactggccttcctttgccctgactttccctgtcagtcctggctaaccagaacatccatgattccaaattattaagatgagattaaagtatcaaaagccaaattgcggaactgtgaattaatagtctttccctccttttttaattattctttttgcttttatttcaatagagtggaggcaatctaggttgtgatttctacttgttcataataatagtatttgggagcatatggtagcctgtatcatccagcccagtgacctcatttggcagatctagaaactgaagacgaaagagaaaggactcgctgaaacttactcaggtagaaagtgctagaacacactggaaactctagtatgtcctatggccccattgggcttcctttacaaattgatgaaatgaagatgtgggtatgtttcaaagatgttggtgtgaaccatgtttgttataatattccactccagggaaattcaaattttagacatttatccactctacaatgataaaatatcttgaaacaacaacaaatctcatatttatgcccaagcagcagtactgagacattctgacggacactaaatttcttcatgttcagatttctgcttagctatttgtttaaaaatgttactttgtcttgtataaacatttgaaaatgcatcctacttttgagcatggctgacagcttactacatggcaccctgacactgtaaataccttcttatgacaccactctgcagtttaacatcactgcctctgtcattttattcataactgagaaagttcagtgaataaaaccacgagaacactcatgctgtacaggacagcaaacaccaatggtgttaaatgggaatttgattttccttctctttttcatttctttaacacatacaatttaggcaaactgacagaaattctccaatgttatgatagctcactttcaacaggagtgtgtgtgctttgtggctacccgctgaataagttggttatctagaatatcagaagattccagaggaacatttaaaatgaggggtttttacattttgatcccattacaattgaaaaatgcactgcttctcaggttataaagttcattaattgttgtaggaataattttgtatattcaaattattgaacatgcaggagtcttggatatctattacataaattatacactattaattttgcatcaataatatctgtaagattatcaaatagtaaaaaaaatttgaaaacgaatttgtcttcttgtactatatattaaaacatatgcatgtgtacataaaaagatatgaagggcagagaaggaagaagtaaaagaagaaacaacttaatatttctaataaaatcattactggaagcagaaagactgccagaaagcaaagaaaatatggtactagaataatcaatctccatgattcttaaaatgggagtcacttggggatattgctaacatgcaaattctgtttgaagatatctctgtctctatgcattctgagattcttcatgtctttataactcctgggcaatgtaatgctgtaggacttcatcactttgagcagcaaggtagcacggtttcaggctaatgggtgtaaccaagggtaagtctgtatcttgacaagaaagagtcatatatttgtcagagtttatatatcaagggaatgccatccagccctgctaacacagagattgccatgccattaagaaccttctactgtttctgcttttattagagagtgttgtgaaagcactcagcttctaacgcttgcctggattttcaggatgatagatagagggaaagtaggattttatgtgcaatggaattagaaataaacaagatctagtgagtctatgcattggtaaggcagttgaattgctttttggttctttacaaggtcttatctaataggagatcattagataaggcaatgaagaaagcagaatgcaaccttaagaattgtggacttatgattggtgacctgaatgctcttttccttgacacactgaacatttatgttgggttagatcactcatttttctaaaataaatatgaacaggaaggagccatttggaatttctactgcattttatattttaaatccaatttatcaaacatgttctggttactaggttacaaagtagtatacttggcattgggtaaaatatattgacccagatggcaaattcctggcattctagtttgcatactaaagattcacacaggaaaatgtacccaaatgtaagatggtctggactttaaacttactagattacaaagttacgtataaactaaagaaaaatgggtaattctgtcaagaaattagtgaaatattttgcagaaagaatttgaacatggatgtttaatttttttttattatgtattttcttcaattacgtttccactgctatcccaaaagtcccccctacactcccctacccacccattcccattttttggccctggcattcccctgtactggggcatataacgtttgcctgaccaatgggcctctctttccagtgatggccgactaggtcatcttttgatacatatgcagctagagtcaagagctcttggggtactggttagttcataatgttgttgcacctacagggttgcagatctctttagctccttggatactttctctagctcctccattgggggccctgtgatccatccaatagttgactgtgagcatccacttctgtgtttgctaggccccggcctagtctcacaagggacagctatatcaccgtccttgcaacaaaggcttgctagtgtatgcaatggtgtcatcgcttggatgtttaatttttattttgtgttctttacaaattgctttcaatatgctttaattttattaacctgtcatctactctacccaaatccattccctccctccttacccactaactttatggggaacccctcccccccatccatcaagtacagtttgtgctgcccatatatccttgaatgtgtttcaaccaaccaagtatggtcaaccaaccaaaggccataccattaaaagaaatagactctcccaattccagactctagtacctgttaatatatcctctttttcatgcccgtgtatcttccccaagattaagttttgtcctagcctgtgcaggtcttatatatactgtcttaactgctctggattcttatgtgcaactaccttgctgtgtgcaaaaggcagattttttttctagtgatccattggttatagcacaatttttcaggcccctcttcatcaatgatgattaaatcttgtagaaaggaatgtgatacagacaccccatctatggatgagaattccatagtctgtcattctttacacattaatcagttgtgggtctctgtccataaggacttttaacttaagaacctaatgagaattaccatgaagagagagaaattactagtttacctagttctttatagagacaaagatgctattctttggaattcagcaaaatccggggttgaattgaattgttggaaaaatggtaccacatcagagtgataattcagcagctgaatctctcaaaagtggctttttcataatgacctgttcccttagtggccaggcggaagagacattttacataagcattttccttgaacacaggagcacaggacttctgagggagatatgaaccaaagatgagaagacatgcatcattccagatcattttcaacacacatgtccacagcacttcaattgctctttgttgtttaaagagaaaattcatcgtttgttatggttttgttggaataatgggtataagaaaaacatctgattttttttccccttcttggatttgtaggtggataaccatacataagaacctttgagggccttaccatcttttttatgtctgatgccatggccggaatggaataaggttggaatcctatctagtttatttatcatccatacagactcaagattgagtgtagacacaaataaaaataatcaagagcactaaccattaaaaacagaacaatgagtttgtaatcacagtctgaaaagaaagaaatttaaaattcaggaggaattaaaactataaagatactggaaactgattataatggggcccaatgtaaattgtttattcctactagatgttgcttgtaatgggtaagctttgcctaaaacaccagaaagatctggaagtgccacttcacatcatatatcattcacttttgtaaaaaattcatctagagcacagagcaataataataataaaaaagtgctgcttccaaacttttgattttattgagttccactaagtttgacacaatgtaccctgtttagtaattttttcaatccattttaattaaaatccataaagataattagtgttcctgattctattttttcttcctttttttttttttttgagtcatctgacctgttgcagtctaagctcaccttgttcccctgttcttgttgttgccattgctgactcttctgtacctgcttccaccacactctgacttcagctctgtgagctacggattgttctgatttttgtcaaataatgctattgatctccaatggcagccaataaccaacctctgaagacattgatggtagtagtagagatcagttagtattgttgtctttgttttgttagagtgaaacacagagaatgtattagccatcagaaacaaatatggaaaggctatacaggataggtatagaggtaataagaaggatattaggaagtgataccaacatttgttgagagctaacttacatcatatactaaatctgatactagaatctgtaaacatgtaaggaacatgaaatggggcccatgaaaccatgtcaccagacatgaccttgtgtaaggtttacagtgacccttcatcatcagtggcacagtaagagaatttgtaatgaaagatcctgtcatacagtcacatgtagcagagatgatttaagaatctccatcttttcagccgggcgtggcagtgcacacctttaatcccagcactcgggaggcagaggcaggcagatttttgagtttgaggtcagcctggtctacagagtgagttccaggacagccaagaaaccctgtctcaaaaaaccaaaaaacaaaaaacaaaaaacaaaaaacaaaaaacaaaacaaaaacaaaacaaacaaaaacaaacaacaaaaaacgaaaacaaaaagaatctgcatcttcatctgcttgccctgctacaagttgagaagagtattccttctttttacagacagcttgaacggagttaatattgccaatatacataaaaagcttaagaaggatgggtactgaataaaggttacagatactatatatccagatacactgcttaccctcttcactgtctttctaagtagtatatagatgtcaatttacatatgatctgtccatctcttagtcagtgacacagaaatatactgggcattcccttccaaattggtaaatggtctatgtataatctgtacatgattaatatgcagacatgttttttaaatattttccttttgaaatctgtatctatggttaccagtaaatgatatttcaagttttggacaattgtcctctgaatagcataatatgaaacatttactaactacatgaaattgtctcaaaaactattttaggactgttaaaactctgctgccatgacaaatcaatcctgagacaaatcaaacaacaaaagttagtcttcatacaaagccttactctctaacgcacaaccccctggagcgagcagtcagaggccaggctacacctatgtcaatgccttctgctcatgcagttcctagatccttgctattctatcaacaaagagaacatcaagggctttttccaatcaagcttatgcttggctcactaatgttcaccttccgtttctcagagcatctttaacagagagtgtaaaagggagcctggagagggagggtgctggccagtgtcttttctgggccatgaaataattaacagataccagtggatgttgctgaagaatcacatgttctttggagaatagagattaggtttttaaaaagttctctccttctatgggagggattcagtcatatgaggaaaacagtaattacaggggagtattcagggccatattacaatttggcaaggcctgaagctccttcctccagcagctgctgttctctgtacagagttcctttttcatctcaaataattaacttgagatttagaaacgcctgtgctctcttatactcatgttggctgctttgtctttttaaatagaggtcaaaatgttttaaaatcaaacctaggtcttagagtgtgtctctgttttccttaagacagtggctttgtggcagaggttttgtcatagaatgaagagaatttgcctgcccactgtgctcatgaggcatgaagggcagaatgaagctgtgcaccctggtagcttgttctctgctaggcacttgctctttataatgtctcagcactccgacttgcatgggaaaatattgagacagtttcttggcaatagacatagaaaacaccatagtgtaggccattggggagatctatattttgaagacaaataagaattaaaaataataaaaccatgcatattatatgtataaaaataataaagccatgcatatgttgtcttcagagaatatacagatctacagagtagggttgaagttaataagctggctaaatgatgtagatgtgttcctgtcttgtttgcaacatatgtcttagacagtaattttaacagaaacataactgaaaaaatgatacataattgaggagagtcatggaaaattctaaggaatggataaacaatatgtagtatcacttttaaaaggtttttataaaaatgtaattatcagtgttttatttataatgataatatattgcatccgtggacacaaatcaaatgtctctcctcaacagcttatgttaatttccattttccactcagtctaaggctgtttgcaattaaatttgccaagtattttagcatgtgatatgactcagtgaatagctttagtgaatctggagggaaagtgtgatatcttttgggaaattatagtgtgtacaaggaaagagaaattatacaaataccaataatgatacaattgtgaactctgttaataaggtagttgtttcataggcgttaccataagtgatgctacaggtacattgtgttatatataatataattgtcacataagaatttgctaacatagtgtctccatggtcttagaaatctgtgaaaaaaaatttccagagtcatacaaccatcaggttttttctgacccactgaaatttaaccaacttaggacctgctgtttctatggcttcgaaatcagcaaaaatatccaagatccaagtatcacaaatgaaaacttcagccaggactacatattttaaattgaagaaagaaaatcatgtttacataaactgctactgctagaataaaatacagaaattgaaagtgatcgctgagtgttgaggtttatgcagacatgactacgacatgaatctactactaaaagcaatatttgaaaacttagacaaaagtatgtcttgctactacacacaggccatttagggcattcatggttaagagagactttaatgttatcctttgaataaggatgaagtaaggtttctaagcagcttatgctgtataagccatcagcagaaaggattcacttcttccaaattctccataggtctgggtttctgctcctagaaaagaatgttctgttagcatataggtgaaatcctgtacaaatataaaagataattttggaatccatggattaggggctcagtattctgactctaacacttgactttgtgtgctgagctctgccttcattttaatgactttaaaaggcaaataataacagctaccctacagcctttttgccttaatattagatgaaagtatgcattcaaagtgattagcgtaacctcagcactcctagatgaaagtaattttatctaaaaattataaagtatggttaaacaatgttagcataagatccagggactttaaagaatattgattagtttgaagttaaaaaaaaaataaataaaaaggaagaagctgtcttcataacaaacaaagacaacttgatttttctttccttttctttgcctttcccttttttcctttcctttcctttcctttcctttcctttcctttcctttcctttcctttcctttcctttcctttcctttcctttcctttcctttcctttttcctttcctttcctttcctttcctttttcctttcctttttcctttcttttttcctttcctttttttcctttttcctttcctttttttcctttcctttcctttcctttcctttttcctttcctcttcctcttcctcttcctcttcctcttcctcttcttcttcttcttcttcttcttcttcttcttcttcttcttcttcttcttcttcttcttcttcttcttcttcttcttctctgaattccaagtttttttttctcaattcttttacttattaacattccagagaccaatgaccccctcccctcctggtacttgtccagatttcctcaaccatttcctccttccccttgcctccaagaagttcctctcccctaacctcaccaggcttcccctttcccaggacctcaagtattttgaggattatgctcatctttttccactgaggccagaccaggcagtcctctgctctgtatgtgacagggaactcagaccagccagtgtatcctgcttgattggtggctcagtctctgggagctctcaggggtcggtgttagttgagactgttggtcttcctatgggtaacactccccttcagcttcctcaatccttctcctcaaacattgggttcctcaacttcaatccaatgatttaaatatctgcatctgtctcagtgagctgctgggaaggccactctgaggacagccatgctaggctcccatctgcaagcacatcatagaaccggtaatagtgtcaaacattgaagcattagatgtaaaggatctggttccagaaggggaggcattccttcaaaggattcttgggaggtggtctttgctagggactgatagaaaatatccagattaacagtgcaaagtgactgaggagtttggggctcaatgattcaatgacttcaaccttgtgtaaaatatctaagatcttgtttaaatgtaaatggaaaggcatgcagtctttaaattcctgaatgatataccagattcccagataacaactttcttagaattgaggtgaagagatactaatttactataataattgagcagaaaaggtagaaagaaagcagttgaaagaacacttctgatggaagtaaccagtagctgaaagttagatctaaagccttccttgagaaaggaagcctgatagatagttcatgaacatagcaacatggatacaactacattggcttaaatggttttcctcctttttgttcctgtttacattattgttgattgtaatagatgagtagcaagaatagaattaaaatgactgggaatacaaatatagagcgtcattcaaacaaatacatttgatttaaattgtatacaaaaactattatttcatttgatcagtaaaatttctaaacaggtaatttttgtttccactgtatctagaaaaaaacacattccaagtggatagccctgaatttgtaaacagtatgaaatttctatattcataaaacttggtgtatatttatgagtttagcttatctttcttagggaggaagttggaattgagtataaacaatcatccattttgttctttttggattatcatcaaagacataattacattgactcatttggaccatttaagctctattgttttggctaaaaatgaaaattttaaggatagggagttggttcagctgataagaaaacttactgtttgttgaatgtagttttcagaattcatgtggggcatctaacagctgcctgtaacttcagctccaggaaatcttatgccctctcgtcttgcctgcattggcacctgcatttatctgtatttacccacacatggacaaatgcacataatttaaagtactctaaactgtaaaacacagaacaaaaatttacttaataagatatctacatctttgccagtagagtgtgtgctattcagaatattgtataaataccagacatggatgtatatacaattgtagacagactctaaggctttaaatgtcatatttaggaaataaaacatttcttttaaaatactgtatctgatttatgaatctatattaaggtgtgtgtataccaaaactattttttaaaataaatataaattgatatttcatatagtgttaatttaattattaattttgatagttcaaggtaattgatttaatatttggcatgtttatcatctaataaattttaaatatccacataccacttcagtatagtattcattattgcatagtgcacatataatttatttaaaataattgatagcattctagaagatttttgacaaatatatgcatatttatatatataggatatattaatttttgactattatagcaatcatagcttctgatgacttcaaaatgttatacagcttctgaacccctttttttaagttgcatggtttagcactttattttgataattgctgtcctcaaaaattgctgactgtcagaagttgaactggagacctgcaaatgtgacttgcataagttgagagcctctcccattcttcacactctgccctccaccactgaccctaccagatcttttatttgtcaaaatacatatttgctgcatgtattttctttgccagataaaccggacagcctgcttcccagagcttacagtttggttaggcaagaacacaaaggtgaataatcaccatgaaaaatcatgagcatgaatagtgtagatcagagtcagcagacacctgagcctttgagatgacgtgtttatcattaatgacacatttacctgttgttatataaaacagagaacagtagaaaaggcagagattaaaatcacagtagcatgtatttttgttcatctatatttcctccacctccttctcctcatctactacctacatgctggagaagacattcaagtgattatgaataattgctattgagtccccttccccagaatcctatttctatctgacattttggcaatctatatgtagatgttccatagatatctcagatgcatttggttgaaaataaatgcattgcatgccttcttataaaaccattttcttcttctatgtacttaatattggtcaagtgtaaatcacttcagctaaagtctggggtcctcagccactgtttggggcctgcttgaactccaagtgtaattgatcttcaaatcttcctcaattccttctaactttgcctttccctctcctgggtgagttatgtccattctctcttatgtaccacactagtagagtaaaaaatcagatttcaagttgctaggcagcaacagttgagaaggccataaaaattaagtcagtatcttgtttatgaaacattttccctgtatttccccttttccagagaataaggcatgcttctctttaacatagactagtcatttagactgtcattgattggtaaacatcaaaagcatctcacacagcactccacagtgactcacttgctaaatttcacattcttgcctttcactggaattttatctttctgaagggaattataggtatgaatatgatttttttcaatattctgactgctcagagtgaagatgggagatgatgttgtgtcccatgttagagaaaaagcacacaattcaggaaaatggtcattaactatcagtcatgacgtacacattaaccttcattatctttctgtgctctgaaaatatccttctgctctataccctttagtgagtcattgttaactcatagtgtatacctatttgagcatagtatatccagaggaataatgaatatattgcctcctgtagaacatagtgtttgtgtgtgagtgtatgtgtgtgtatgtgaatgtgtgtgtatatgaatatgtgtgtgtgtgtgtgtgtgtgtgtaagcatgcatgtgtgcacatatgtatgtgtaaaatcatcctgtgggcttgagaggaatacaactttaagcatcctatagtatctaggcaaggaaaaaataaaaaccagtaaataaatacttccatactctctttcatgccctgacctgcagtacttaaacaacagggttctggagggaagggagcaaccatgacaaaattgggatcaggagacaagaaggaacgagacaagacaaaaattctgtccaagtctcagtttactctagggaaatgaagggtttataaagctgaaaaccacaaacggtatttgctcaagtgcacaggccacaccaatattatcgcttggtaacacattgacatcaaaggaatgtccccattgtaaaatgtctggagaacctctatcgtaaagtgtcctgactgagttgtgggaacagaagcaagatagtagaagaaaaaaagagtgttaattgataaatgatagcccaggaacaagatggagactgagatgccaggggcttttgggccccaacattttcacactggctgcagcagtaacagtgcataagaaatactcaagccccacatttgctccaggattttctgtatgttttcttgaaaatggctaatctggctaaagggagataaaatttcaaggtacttctaatttccatttccgtgataaagctgagcatcttttctttcttttctgattttcattattgatggaagaagttgcttaggtggcagagtaattgactaccatgcagtaaaccctgtgttcaagatgtagctctgtgaaagtggagccagaaatatcagaaattcaagaacaccctgagctacatagggagtttgagaccagcctaggaaacaaaaaccaaaaattaaatatgtattgcatatttgtaagtcatctttcaaaacttctgttcaatttatttattcatggttgattttgttgtttggtatctagattttgaagggttttgttgttgttcttttgttttttgcttgtttgtttggtttttggtttttggttggtgttttgttttgtttttcaagacagggtttctgtgtgtagccatggctgtcctggaacttactctgtagaccaggctggcctcgaactcagaaatctgcctgcctctgcctcccgagtgctgggattaatggcatgtgccaccgctgcccggctggattgaagtattaattctctgtcagctatataattgtttcatactgggaaaactgcctctcattgtgcatgcagcctgcccattgttggtgattgcagaggggaagcgttgcaatttcaccccatcctatttttcactcctcacaagcattgtctgagctattgaagtccatttccaaaacgtgcgtgcgtatacctataccttgaagtgcttgcctctgttttaatgggataatttcagagcttcagctatcatattgacatcattgacgtatttttaatgtgtgtgtgtatgtctgtggtaaagaccttgtttacctcttctacatgtgagtctcttaagtactttcaagataactttatatcctagaaggatgttgtttgaatccattttcgtgtcaatacagattaaaaagaaagtttgagtgcttttgaaataatgaggtataaaaaggtgtggggcaacagcccaaggaaggaatcgtgaggagaggtggctttgataagacaattattccttgagtaggtatgaaaaggggaaaggtaaatttgctttgaaatttcttgtgttaaatgattatggctttctgagtttccaaatgactttgttcttcctttgctctttttcttttttaataaatttaataaatttaataaatctaatatgatgtattctttggccacattttcagcctgtgaatccagaggtggcaaggtagtctagtcctcttaggaaagaggagtaccgttgaaatgtgcatatttattggtgaccagctataagattagatttactgagcaaatagattttgtgcagccatccaaaacagagtggttgccagagtgctagaactggcaatagtatttctttgatcctttaccaatcagttatcacattttcaaaattataaagggcagaactatgcccaaggaaagacttgtgatgcacaaacataaacctgtcactgagctctgtgcctgaaaggatgattggtgacgatcatcatacaagcaaagcaccattgttagcactgtcttataattcatggtgaggcacttaggaaaatatgactggtcgtcattatactgcatccattctattttctgtaaggcagatgaatgtggggtcgtttgtttagcataatagttttcagcatggaagtagagagcaagtttattacctgaatttccccttcccctgagagggatttgtttcactttgaagtaggattcttataaagaacccacaagccacagtgcacagggtagtttccttgaaattaaatctaaactatagtctattttacttttccaatttgcctggaatccaagaaacatgggcacagattgttactgggcgcttcggttcgtaaacctgataccttgttttttcggtgtttcaaaggaattaggaaacagaaactggtaaactgaaaatggatttatttatagtctggtagatcatggtgtagaaagaagctgacttccttctcattttccttgtgtattctatgtatgcacacttgacagtttatagagatcatggagacataggttagactataagcagatttagccttctgtctttgggagaagagaacctgattccaagctgtctctcttctctttgcttgcatgattctagtctgaggaaaatagattttttaaaaagacccttcatttcttaaaaaaaaaaaaaaaaaaagaatgggcttatggaatgtaagattatcctctcaacacttacttgctctgcacttggcagaggtctttgtccttatgtccatttccctgattggcacatagtggagacttgtgcaagcctcttaaacattatttttaagtgtatattaaaaggactttcctggctgctgaaggaggaacacaggtgtctctttatatttcccctctttccagagacttagtatagactcatagatgcaatacaaggatcaaacttcagtagatttagccctgctgaaagactacaatactttagatgtggaagttggttaatgtcctacaaagactttctgctaggttataaaagaggctagtaaggactccatttagaagagatgatttaaggacatgaggaataaatgtttggagtagaaagtgggttctgtaagctctgatctcaagttttctgattatcacttctgattaacttatcactcctctgagattgcttttcttctgtaagacagccacccacacataggaatcagcagactactatttagattgtgtggggtaacacatagtgtgtcctaagggaggcaacactatttgcaacagatctaaaggaaagactgtccttacacccccccacacacacacacacacataggtcaatagacacttttattttgggtgtattttcttttcttttttccaaatttttattaggtatttacttcatttacatttcaaaggctatccgaaagtcccctatactctccccccactctcctccccgggacccactcctacttcctggccctggtgtttcccctgtactggggcatataaagtttgcaagaccaaggggcctctcttcccagagattctattttcaacccatattctacttcatgtttcttattttaaggcaaggttgattaagaatttgtggcatcccatggtgcttcctccctgctcagggtcttctcttttttttctcgctttaattcctattgtttctgaatttacattaccacaagggctagttggctcaggaaagcggggagggtgcctgtatttaaataggaacccttcatcaaaggaagactctacagtttcctcctccctttcctagcactccttcagaaaacgggcaaacacccactgtggcttttaggccttttaaatgaggtgggggaacgaatacatttgggaggggtcagtaataaaggatttatttctaattttacaaagatgctgcctttgacagaaggaagagagatgcaggtagagtgaaagctgtcaccaccttaaccttcaacagagcatcagctatattatgtaggagagagataattataggacaaactgtactgattcctcatcagccatgggggagatggaggaggacaagacaaggataacctgcttctatcatttgttcaaaaatctctctctccctcttcctctccctctccttctcttccctctccccctctctcagaacatctggagcaagaagagttataggcatttgtgactcacccacatgaaatgggtgctaggaacaaaactacaaactctgcaactctgcctgtattcataagttctaggccatcatgcccagtccccattttatcaattgttatactaattttatttgccaaagatcccaggacaatctttaaaaccagagctgtcccttgatacttctgtccaatttacaggctgagtacccaaagctctattctggtgccttatgttctaaattatctcatgtaaatatgacaggaaataaaagccatggagagcctcacttttctagcagactgatgagatgtaatgaatgctagaagactgtaaaaccagaggaccaccataacactagttttaaataaattccttctcagctaacagacattcggagtggttgtttaaaagtaaagttcacagcatgtgcatatccatatgtacatatgaaatgaatctgtttttaatccttggaggaaaatgaaactatcccttcagtaccactaccctttaaaaatggagactttgaaggaagtctctaagaacatagaacttatgggatatttaagataaactatagcttgaattcatcagactccttgctttatttcccaccagaaaagggcctcaaaatagaatttctatatgaaacctatgtgaaccaacctagaactgaggggaagttggttggtgactgacctcaaagcactttaataattagcagtattttctcttgcatgaaaggtcacatataactttcattacatcagataaacagaaaatgtggcattgggatcaactttattctaaggaatgattactcataagaatccatagcatttgctgaggtaaccaacaccttccaggactgtgtggaactggatggctatcatggtggtctggagttactgagaactgtccctagagcttctgatatacagcaggccacagaaagattccaggatgaaactttcagccttaaatttttatagcctgaaactgttgctgataggctaggctgcgtggttgaattatatgggcattccatcaacactttgactcagataactggagcttgaggatcctaggtccttcactttgcctaccacatcctttctagaaaatcactaatcttgtagacttttagtactcatttaaaaacctaaataatttctagaacatgtggtttggagggttatcatttgtgatagtcttggcaaaacatcattgtattattgactcaaactatacactatagtaaattattagattgatagatgtagtttgtacatgacaaaggttttatcacaaacaaagcacacacacacatacacacacacatacacatcctcatgtatattcagtaaaaataatggatttaagcagttggttagagtagctcaaactatctgaataattcatgtttttattaaacaagcaacatataaagatttctttgaacaatgtttttttgtttttgtttttgtttttgggttttgttgttttgttttgttttttgttttttgttttgtttttcgagacaggatttctctgtatagccctggctgtcctggaactcactctgtagaccaggctggcctcgaactcagaaatccgcctgcctctgcctcccgagtgctgggattaaaggcatgccccaccatgtccagctcaattaatgttttttatcatagctattatgagtcagtaataatggtctatatagtaaattctcagactcattgttatgtttgtattatttgaagaagatgtacttgatttctactgtctcaattagtgtgtagtaaccacaaagaatagatttttaaaaatgacatttaaggatatttcaattttgtggtgttacacgataagggtggtagataaataggcatgatacaccttattttattgtttatacattggattcacattaccttgttcatttgcttaatataagctctatgcagaactgtgtgcttaaaacagagatccagcatggctttaagggtgctctctatatgaagcagcttcaaggggttagcatcacagaatctggagaggtaattgcgtcacagagcagaatgcacaattctaggtgtggaaggtatatgtcagatacaaataactgagcttgggagaagtagtttcttggaatggttcacaaaaggcaaaatgctgaaactcagagctacaggaatggattactcaccaatggaaaggtggagaatgcatgtaagtttctttcgagtttttgtcccaggccattttcacctaccactccagtgcaagaccttaaagcatttgcttcctggaagctccttaaactattggtaagtgagccacacaaagaacaaagctgactgtacacgttataggaagagataagacagtaaggatcacatgtcagcaaaggaagaaggtgtccatatggaaaaaaacaaaaagagaaaaaaaaacaaaaactgctctgtaattgctatgtatagtgcactccatgcagacaaaactccatatgcttcctagttctaacacagcaacggaaatatgaggtcatatttattgttttaattttataaagcaatcaattactgaaagtttttagagacgagtaaatgcttttgtcatacacatacaatgagaagatttgggagtaagaatctgattgacttcaatcaaagcagcacagtttggagggcatcttgcatgctccgtactaaccagcatctcacataggaactcaatattatggaaagttacaagctgaaaaaaacaaggtaaatgatgaaagaactgaatttgtggacatattaaaatggattaaaatatattaaataatgtccaagttgttccagaagaaagtgtggacagagggggaaagttatgcatgtgaatacacagatatgcacagtaagactctcaatataaataaagtttatttacatatacactcactcacaacataagaggttctgcatgaatattttacagtcagggctcctctccagctctatatagtaatagacaatatggatttgtatgaaaacatttaaaatatatgtagtgcttatatacaagtatatagaacacatgtgttatttagatatgtgtatatgtgttggatagcatttgaaatgttaatgaagaaaatatctaataaaacagcataccaaaaaaaaagtttttaacatatgtggaaactatttgctgttttacatctggcattgaaaaaaattcatgtttttcaaaagtaataccctggggaatattggatgctcaattacttgaagaatataaagcaaaattagataaaataccgctccaatctcaaaatggtcacattgtaaaaaattacatgcacagacacatatcattaaaagtacttttaatttttccaaatacatatcccaatatattcaaacaatagtttccatggaagtaacaatatttgaagtaaaaattcttataaaattaatttgctggtagaagctaaactgctatataatataatatagaaactaaagactccttacagtagcataaaaagcatgtagttatttaaaaataattagttcagtaaaggtgtgcttgaatggaaggtgatgggaaggagagagagaattaatttcccaaaaggcaaatgcagataaaactgtggttggtgtattttgtcctgcaggtacaccttgtctgttctcttgggttttatttcgaattagcatgtgctctaatgattgtacacctccacaaatgacaaaggcacctttctgtcactactcactgtgcaagtgttctgagctctgccttggcttgccccttccatgatttgataaatcaagtgcaaaaacgttacacagaatctttaagagatgtttcaaattacaatgtgtcctacccagcacttcagagttcttcattaagtaatggaaacggtgatcacgagatatttgggggggggtgcagggagagcatccatcctgattcatttgatgtttctgttattacaggatcatacaaaattttaaaatgataactttatgtgcaaatgcaaatagaaaccttccctggtggctatcatctatatgtatctacaaaggcctgggttcagaaaacatcttcaactgtgaaaactttgttataaatacatgtttctgacaggtgtcagagttggtagccttttctgacaaaccttaacacatcccttttcttttttttctttgcttttttattaaatattttctttatatacatttcaaatttcttactcaagctaggaggacaaattattataggaaaatacaatcttaaacgtttttcaggcaggactgtggtggtgcatgcctttaatcccagcacttgggaggtagagtcagttggatttctgagttcagggccagcctggtctacagagtaagttccaaggcatcagggctacacagagaaacactgagaaaaacaaaacaaaacaaagcaaaacatttttctggattcaagatattttgccaattacatgcaatagannnnnnnnnnnnnnnnnnnnnnnnnnnnnnnnnnnnnnnnnnnnnnnnnnnnnnnnnnnnnnnnnnnnnnnnnnnnnnnnnnnnnnnnnnnnnnnnnnnnnnnnnnnnnnnnnnnnnnnnnnnnnnnncttcctcctcttcctcctcttcctcctcctcctctcctccccttcctcccttcctacttctccctctctctctctctctctctctctctctctctctctctctctctgtttgtatttgagggaataatgaagtttctgtgttatcacattttcttattcaagggcatttatcttctgtgggcctaagattgctgtgagtgctgagaataaagcaagaaacaaagaccaaaaaaaacagaggtttccatgtgatagacatggacaggttacaacaatagtatcttgatcagagggaaaaaaatgaacacaaaccaacaaacaaaaagggcaaacacaaaaaagaacatgcaagctaagggcagtagtgtcccatagaaattaccatggtgacagaaattcttatacacacaggttgtaggtagctatagtatactagatttaagctaagtatgaataataattgaatcttaaactttaccaagttttaattaatttagagagccacaagaggcacatacttacgctgctggagagttacaaaagtgaaggtatatcctggggaagagcagcatgcatctcaaatatttatgttcatgaggctgagtgaggaggatcagaagttcaggatctgccttggctatataatgagttcctgcccatatgatctctttcaaaaatgagcatttatattcatgcagggataaccaagctagtacaaccatgtatggttatagttataagcagagttagcaaagacattggctctgaaattaaatggaatggaggacagtatggatgcatctgtatgtggataagaggcaggaggtcaagtccctgtggggaattggagacattaccctaaagtctaaaatattgtacattcattctaaatcttacattttataacaattcgtttggcttttagtttcttcaagtctttgtaggcacatactttagctggagtatattataggacaaaattttaccaagtttatatataacttcacctgtacttcagtcctttaaggtgcccctatattttctttgcttaccctattggtaaggtatgctacccattctactgtaggtccatccttactccagcaaagttgttctttttctgtctgtctgtctgtctctttgtctgtctgtctctctctctctcactttgtagaccaggctggcctcgaactcagaaatccacctgcctctgcttcccaagtgctgggattaaaggcgtgtgccaccatgcccggctctttttctgtcttgagagtgagatcatctcaaaaatcaaaaaaaaaaaaaaaaaaaaaaggaaacatgttatgggaaaaaataatccaattttcataggctgacaattctttcagattaatgagaattttaggtcacatagctgaagaaactagcaagcaaaattttttcaattaaaaacactaggtgggtaagactgtataggatgttaatgaagcttcaagcattcagaattatcttgacttacatctcactaaagaaatactgtcatacttgaaaacttcttgacatacatagatatttcactttcacataacagactatgagactattattgtagattttggctttatcagtgatttcatttctaaaagaagtcagataactctataagaataattattatgctctctttccaaagtttacttttaattaagaaaatgtttaagcaggactatggcttcctttaattaaattcctttttaaaaattgtcacctcttaatctgctttctctcttctctatttctttgtttnnnnnnnnnnnnnnnnnnnnnnnnnnnnnnnnnnnnnnnnnnnnnnnnnnnnnnnnnnnnnnnnnnnnnnnnnnnnnnnnnnnnnnnnnnnnnnnnnnnnnnnnnnnnnnnnnnnnnnnnnnnnnnnnnnnnnnnnnnnnnnnnnnnnnnnnnnnnnnnnnnnnnnnnnnnnnnnnnnnnnnnnnnnnnnnnnnnnnnnnnnnnnnnnnnnnnnnnnnnnnnnnnnnnnnnnnnnnnnnnnnnnnnnnnnnnnnnnnnnnnnnnnnnnnnnnnnnnnnnnnnnnnnnnnnnnnnnnnnnnnnnnnnnnnnnnnnnnnnnnnnnnnnnnnnnnnnnnnnnnnnnnnnnnnnnnnnnnnnnnnnnnnnnnnnnnnnnnnnnnnnnnnnnnnnnnnnnnnnnnnnnnnnnnnnnnnnnnnnnnnnnnnnnnnnnnnnnnnnnnnnnnnnnnnnnnnnnnnnnnnnnnnnnnnnnnnnnnnnnnnnnnnnnnnnnnnnnnnnnnnnnnnnnnnnnnnnnnnnnnnnnnnnnnnnnnnnnnnnnnnnnnnnnnnnnnnnnnnnnnnnnnnnnnnnnnnnnnnnnnnnnnnnnnnnnnnnnnnnnnnnnnnnnnnnnnnnnnnnnnnnnnnnnnnnnnnnnnnnnnnnnnnnnnnnnnnnnnnnnnnnnnnnnnnnnnnnnnnnnnnnnnnnnnnnnnnnnnnnnnnnnnnnnnnnnnnnnnnnnnnnnnnnnnnnnnnnnnnnnnnnnnnnnnnnnnnnnnnnnnnnnnnnnnnnnnnnnnnnnnnnnnnnnnnnnnnnnnnnnnnnnnnnnnnnnnnnnnnnnnnnnnnnnnnnnnnnnnnnnnnnnnnnnnnnnnnnnnnnnnnnnnnnnnnnnnnnnnnnnnnnnnnnnnnnnnnnnnnnnnnnnnnnnnnnnnnnnnnnnnnnnnnnnnnnnnnnnnnnnnnnnnnnnnnnnnnnnnnnnnnnnnnnnnnnnnnnnnnnnnnnnnnnnnnnnnnnnnnnnnnnnnnnnnnnnnnnnnnnnnnnnnnnnnnnnnnnnnnnnnnnnnnnnnnnnnnnnnnnnnnnnnnnnnnnnnnnnnnnnnnnnnnnnnnnnnnnnnnnnnnnnnnnnnnnnnnnnnnnnnnnnnnnnnnnnnnnnnnnnnnnnnnnnnnnnnnnnnnnnnnnnnnnnnnnnnnnnnnnnnnnnnnnnnnnnnnnnnnnnnnnnnnnnnnnnnnnnnnnnnnnnnnnnnnnnnnnnnnnnnnnnnnnnnnnnnnnnnnnnnnnnnnnnnnnnnnnnnnnnnnnnnnnnnnnnnnnnnnnnnnnnnnnnnnnnnnnnnnnnnnnnnnnnnnnnnnnnnnnnnnnnnnnnnnnnnnnnnnnnnnnnnnnnnnnnnnnnnnnnnnnnnnnnnnnnnnnnnnnnnnnnnnnnnnnnnnnntatcactcactatatgctgtcaaatattgactagcatgctgatgatgccattcatttttattttctcttttggtttagtaactgtgaaattacacatcatatgccttcttttccttctcaaggtccctatctgcaatgcccagcccagtaaaggtaactgaaaccctgtctacctttattcttcccaataattggttgtaacccttttttatttaaccaatagctttaaatttgggagcatgatttccacaacaaaggccagtttacaggagaattcattctaagatctggggacaaccagatcttagagatcagaatttaagatttggatggtaaacagcacctgaccaacccccaacacttaatagttatgtattgatagataaaagggctcctggatggtgctctgtgatacaacaccctcatagcataatgaggtctgggttctgtctctattacttaagaattgaacgaagtgattaattaagtaaatacataaataaatatgaaataaatacaagaaaaaacgggatggggactgtgtctgttttaaacacatccataaagggcaaccctcgatgagatataccaacagtctgtacttgaacggtaatctttttacatggaaaatttctcttctcatttactccatgtgtttttcacaggaacaaaaaagaaaggaatgatctcattaccagttttggacaaagaaagccatgtttctcaaatcagatcttttctgtcttggttttcttgaatactctgcaaatttctttcccagctctttggcctcaaggcctgccaaagagcccttgtttcccagagctccctttaggctttttgccttcctagcagtccccaattctgctctttgtctgcctctccagccagtcctcacactggtcctttcccagcctgtctttgtgttcttactccatgggaactcttccatgggctcctcatgtttatgcagtctagaccagaggagagccttttatttatttcttggacccagcaggggtttcctgcttggttttctgtgtcagaatctgagttaattggactaatcaatctaacgaatttttcttaagttattctactatcttagctccaagagctagtcattgaagctaattggtggcacccccacgggttaaatttcacttcaccaggcatgctttgtgaggtcatttcacacactggaaataatgccttccttccatctgtcccttaaaaggtttctggcaaatgtatttttaaaattgctaagatagtgggtgtggaaaagcttggtttaggaagatggacacacaagcgagtttagagcagatagtgtaaagtttaccagaaactgaacagaggtcccactgtgtgcactgaatcgaacgctcattatctctacccgaagttctcccttttcatctagaaagcacaggcaatacctgtgctgtggaaatagagtaaagaattttaattaaaaatcgattgtgaatgagattgtttaattattctcaaaattgcgctgctggtagtagtacacacaaaatgagtagcagagggatcatcgcaagcactaagcggagtcatttgaaagggaaataaattaagcatttggcactgagtgatacattgatcttatgggttaatgttaattatgaaggtgttacccagggccatgaggctattctgcaccagagtgtgtacaggaaatctctgtggagtgcccacaacaattcacatatgaaatatgaatcctccagcttaccaattactctcaattcatttttttcctggtatagttgaatcactgactagatacaatacagcaaaaagagtaaagaaaatggcactaaaagcattcaaactgaagaacttaaataacagaaaattgtagtctcaaaatactgcaaaagagcagtctctcttaggtcaggatgtgtcaatggggctcagtcagggaaggcatccttctgccttacacagaactgtcttctcacagagcacttatcaagagagcaaggtctgttcttgcaaggctcatctatacagtgtgacttatcttacctcactgactttcataaaggctttctctcagacagttgtactaggctttatgcctttgacatgcattttatatgaacacaatttagcccacagcaggagataagataggtctatgttttaatatattctcattattcttgtttactagctatgaaattaatctttgcctactattttctgattttgtttggttaaataagtcactaaaagcgatatgaactcttttcccctagttttcagttttttattctcttggctactctgcagacaataataaggactacaaagcatgtaacataagacaaagaacttggaaggcaattgatgcaaaatcaacatcacaatcactcagaagtaaggaaatactacttatctgcattctctttagctggtgtcttttaaactgctggtgtcatgagataagaaatatttctattcacagctttctatattaacaagatttctgattatttaccagaccatcatgatttaatgaagataggtaaaaaattaagaatcattgtgcctctattgcatacaccaacaagattttgctgacaggaccctgatataactgtctcctgtgagactatgccagtgcctggcaaatacagaagtggatgctcacagtcatctattagatggagtatggggtagccagtactagagaaagtacccaaggagctgaaggggtctgcaaccctatgggaggaacaacaatatgaactaaccagcaaccccagagctcttgtctctagctgcatatgtatcagacgatggcttagtcggccatcaatgggaggagaggcccttggtcttgtgaagattatatgccccagtatagggcaatgccagggccaggaagcaggagtgggtgggttggcgagcagggggagggtataggggattttcagagaggaaactaggaaaggggatagcatttgaactgtaaatgaagaaaatatctttttaaaaaactaaaaataaatattaagcaaaaaaaaatcattgtgtccacataaggttcctttattttgcttcctaggaaaggctgttcccataattggaggaaaatattattcaggtactatatagcagagcaaagattgttagcctcttgactctgcctgtattctgtagtatactccaacagttcccaagcacttgatgtcatcatacggatgactgctattcctagcaagtcctcatctccttgaattagccaaaatgccactcttcctgacctcactcaagaaagagcaaactctgagtaaggaattctatgaagaagcatcatcatcaagcaccatactattataagaacacaattattgttttgaaacactgttattagaaaaactccctgttatgttcttctgtgaggcagattgctactctttcatggaaggctgcagaacaggtgttctgagttagatttagttgttaagcattgtcatctattcgggttctgtcagtaagattagtgcaagataacacaggtatcctggtttctagatgcttagcctctagagctgtgtttcaatcccatcttttatcctcttagcatcatttctggactcttttttcttgagaaatgtttctatttggatagaatgtctcacactgtttcttgttcccagccattttgaagtgtcacagattgatatctcagcaaaagaactctgaaatctacttgtttgctttccaatcctgactccaccatttgctgatcttaggactgagcaatacacttagcatttatgcacagtagttttttcatttgaaaaaaaaaaaaaaagacatactcttaaaaaaaaaagacctctttgcatagttgcgattacatatacaagtttaatagattacatatacaagtttaatagaatgtaattcccagggggcatagttaggaaaacaggctacctgtctcttatcttttcactaggtgtaaatccaaaatgtctcatttttatagccatttcatttacaatccccaaggatttaggttttgggagtaacttaaaattctctctctctctctctctctctctctctctctctctctctctctctctcgtgcttttattttcctgtgtttttgtgtttatccttaaaagttgtgtgcttgtataaaccatggaaagtttgaaaggagcctgtaattactcaagagttctttgctcctaaatcctcaacaacaatcatttagtttgttgtcagagctattgtgcttaattaatatttatgtacgacttagtgaaatcatgaaaattaacagatgtccttatctaaacaggtggtgcatgtatcaacaatggcaataagaacagtactgctgcagtagcacttctttatatctgagtcatttccaagttgagttagttatcttggctttcacatttatgtcccagcctggaaagcacacaattgggccaataaacttggttatcagtgcattctaagatattcatgtgaaatgtgaaccttagtttatatttcaaaaactaaaatataaagagtagctgtcctagttacttttcttttgatgtgataagacatcattaccaaggcaacttataaaagaatttattggggaattacagtttcagagggtgagtccatcaccatcatggtaggtagcctagaaggatgcaggtatgcactgaaggaatcctaaagggcttatatcttgactcccaagcaggaggactagtgagagaaagtgtgtttgtgtgtgtgtgtgtgtgtgtgtgtgtgtgtgtgtgtgtgttagtggcggtgctggtgctggtggttgggagtagggggtgtcaggcaggctttttgaaaacctcacaacctgctcttaatgttgcaactcctcgaacagggcacatctcaacaatgccacatttcccaattctttgcacatagttatacaaactgggaaccagcaattaaatacatgatgttgtggagcccattctcattcaaaacacctcagtggcattgtcagaaagttgttatagtatctcacagaaaattccagaaatcatatagagttgacaggctgcctttctagaatgactgaggacacggacttctttgttattaaaattgtagtgcttcccaagtctcagccagttgtgtatacattgtaggaaacagcaagtaaaacagtgtaaaagggctctatatcaacaaacacctctagctcaacatcccttattctgtgctgtatcagtgctggatctctatagggcttttggacagatcgtattcttagtcatatgactctctctgtttgcaagatattcttaagaatttatcattttatttttatttgaggctcattctatctcccaaaataaaattaacttttcacctgagaaagggaaaatgtccactaaatagataaacatcaaatttgaaatgaattattaatttagaagctggtatttttcaatattaagttgttaagtttgtttcctatttaatactcttccctatcctttgaaatcagtttacaacttggaataatttttacttggctcaagtctattgatcatagcactctctcttaagaggactgaatgacaatttcataaaaattctgatggaaatccactcactctttccttcagctcctaaatataacaccacttgtctcctgcataccagatactaattcaggtgttgggaataagtgagcaaaacaaagtgaaagttagtctggagcgctcgggtgtttgatggggcagcatagatggtaaatcagtagcaaaatttagactgcagtaaatagagtgttggataatgaaaactgatacttacaaaaggtgatgggggtgaacatctctgtagagataacccaaaatgcacacgccttctggggaaaaatgtgcttgaaggggctcatctttcagagcaacaagggcacgggagctggacctgatggatggagaaatcagatttgtaggagatgaggcttcagagacaagtctagggtgagatgggaggtgacaccagaactccttatgatgagctagcacactgtaatttcccaagcccaagagaatgcaaaaatgtctggtttcactttgctgtttatttttctcttcttcagttatccagttgttgaatgattgactgtttctgcacaggttacttcattagacctagaaaacaaaactggaataggaaatattttcctattctgagcttgaactatttactctctagagactttcagtcagctcagaaagtttaaaagtcctcaactttgtgcctctgtcttccagcaaccttcatttgcttggtaagtgcactctcttctatgtaatgaaatatttttatacaaaaatggccctgataactttagctgaactgttatatttgtcttccttcaagacggaaatttcaagacttctcattgcattcatgatcaaaccctaagaatcatgatatcatcctaaaggattctatggtgtgtgtgtgtgtgtgtgtgtgtgtttgtgtgtgtgtgtgtttgttacataactgcatgtatatttctatctagcacgcttttcctcccttgcctaacaaagtgctattattccttcatggcaactccttcataaaggtctccctagccttttctccgagagttaattacttctgtccacgttcagccctgtacttctgtcatctcaggcatcactgtgtattgttaggattttatgcttccacttttatttcccactagaatagaagttccttagttgtcaaatgcaaagcttatttgttcttgaaactctgatacctagcaaaggacttggcacacagtcagtttgaaaatattttgtttttgatgaaaaaataccctattaaagatgaggcaaatggtcacagcatgaagtaaatagaatatgcatataaattgggtttttattatgtaatctttcaaaaaaatcattatttgaggggacacatagtatttatcagaagtcattatttaatatatgtttacatggacttattatttagcattcaccatattttatgtattttaaagcatttcacagaaaatctcacattcctttgccattttggtttgaaatcacttaggccaggtaatgggacacacgcctttaatcccagcacttgggaggggaagaggcaggcggatttctgacttagaggccagcctggtctacagagtgagttccaggacagccaaagctatgtagagaaaccctgtctcggaaaaaaaaaagaaaagaaaagaaatcacttagattttcttcattctctcatgtatagtagaatagactaccataagatagccatctttagcaaattttaaatattagactatcataggtttataagtaagtatatgcattcattaaaccaaagagatcatcactggattgtggacatcctagggatagaggatatagcttattcatctttgcatctcctctgcagactgctggcatgggaatctatattaactttctgaaacccttaggaaatacggtgtgctagtaaaagattaactgactttcagaaacaccacacacatgatgcatgcgcactcacgcatacacacacacacacacacacacacacacacacacacacacacacatacacacatactcataccctcatacacacacgttcacataccagttgacaggtgagtccatctatttctcatgttaagaacatttgtacccaatgaagccataatatgctgtttaaccatggttatggatcttccacagagtattaaaacagaaaacacttgaccttgagaaaccaatatattcataaagtacatattagggcacacttctagagatctctaagacaaattttaataaaatactaacatttttaaaacaaaatacctgaatcattttcactgaaaaacatgagaatagaaaagaaaaactaacacagaacaaacaaaacccatggcttttaatttcaaggctctctctctctctctcactctcttgcttcactttattatggcttatatggtaataaaaattttatatgccccagtacaggggaacgccagggccaaaaagtgggagtggggggtaggggagtgggggggagggtatgggggacttttggggatagcattggaaatgtaaatgaggaaagtacctaataaaaaaatatttaaaaaatagtcaataaatggacaaataattatggcttgtaagatacttaacttgggacgttgattttgggctgattgattgactttgagttctcttccgctcctgtgtaaactctcagtaatatcgcagtggtcttttctccccttattgaaaaaaatagttttccacttacaatgtagtttaacatttctttattttacatacttttatagtgttttatatttatatttaactggtttaatttgcctagttccttcatatgatataagtacaattaagtttaatgtgtttttcaaatatatgcctcttcttgattatccattagttctgaaagtttcatcacactatgagggaaaagctagagacatcctaggaaacttctgaagaaaacacctacactgatgtggaacaataggagatttccagagtaccctcttgtgatttccacattacccaccccctctggtggctattcttggttctcaacttgactacatctgaaattaactaaatgctgaagctgctgggcccatctttgagggattgttagttgggtcccttgaggtaggaagacctacctgaagttgagatcatgggaggtctgaaaacccttttacatctggagcatgcctttgcatagcagcttatataagtgacaagggagaaagataggatgtcgctctgtgtctgtatgtctgtgtgccgtcagtctctctggcaagttcatcctttcattggcattagagcttctttgtcaggtgtgtactgaagactagctgagacttacagctttttagcctgaacagctaccagattcttggtctatctattgatagatattcatggttgagttgggtggatcacagtctaaaagtccctctaggaaatctgtgtatctatctatctatctatctatctatcatctatgtatctacctactgacctatctattcattctacaattctgttcttctagagtcataactaatgcactatcaggtttaataaacatacataggtaggtgaagggggtttgaaagcagactctcttcacaatcattatccaggagggacccaggctactccttgccccatgtagaagggattttcatacaagtggataaagtgttgctgttaaagtttcacttcagtttaatttaacttattttaaaataattttatcttggcttgaatttgaaccaaggggtagactaagggtactaagagcctgcacaaatcaatagacttatgctcagctgacagtcccgctttatttggtctcgtgtgactaatggactaagctaattctttaaagttgatgtttttaggaaattaaagatgttttaataattagagaattagttctttagaaatctcttggcaatcttatctttaaaaacctaatgtctgtggggtttttttatgcataattgtatcaagctcacaatatcctatggcctagggaggtagcagtaatggtgcttcttcatctgaatttctcacttttatcccccaaaagtgcattttccgcaaaattaaggtgggagaaaagaagtcatttcagctatgtaaaaggttttgttgttgttgttgttattgttttgttttattttgttttgttttacaatatacgatggccttggcttccatagtaggtaactggttcatgaaaattggctttccttttggagttgaaaatatttggacttaaaagaccaagtaggctggtgtatggtggtccataatcacttgtttcaaggatattttctacctactgtctaatctgttaatttattagtgaataatggaaagtacttcctctccagagttgtgtgtctttctcatatctgtaatggagaagctattcttttcagagccaaataaaataagtatgcatgattaacctatccagaagagagtgagatcaacttgaatttaccacaaatgtaaacacacatacacatggaaaactttagctttctatttgtatgctttctcaaataagtagaattcacacatctctccaacacacacacatactcagagactacagttcttaccacatatccaaatacactctgattatatatgcattcaatgctaaagatggtaggcctctaacagtgtgcaagaagaaatcacttgacctccctgtaaagtgtcaataaatattaattccttagttttatatgacacttgggataattgccttgcttaatttctattttatatgtttaaatatatttattgaaatatagtatgatttattaacattataataacttggtattattctgagtactatggcctgtaagataaataactttgcccttatagagaaagcagaaggtgtaatcattatgtacagtaaaggtattttgaaggcatatttcatattaaacatacaaataaaatcctacccaatatgattaaatctaaagggatataggaaagtgaagcataccttatgtatatataaaattttatcaaaatgaaaggtaacttatcctatgatatatagtcctcaatccatgtgtgtccttctgagttcacaattaatacatttgttactgatattattttttggatgaaaaatctatttaatcaaacaaattggctaatcacttgagtaactaatgatcctccagagatcatccagagtagaaaaatatttaaaacataaaataaggaagtttaaattggtaagagagaggaggactgttgatagtttcttcaagtttcatgaatacacactgtcagccacataggtgagtacttttggatttttacacaatgtcagaatttattgagtcacaataaattctcaaggtaggcaaactgcttcagatagatattcctgcttctcttagcaactgtgctggttggattttttgtcaacctgacgaaatgtagagtcatctgggaagaggcagcactaatggagaatataattcagcagattgtgcctgtgggagagtcttcaggggcatttcttaatgttaatgattaatataggaaggcccagaacactatgtgtgctatcactctgagaaggtgctcctgagtagtataagaaagagggttaagcaagccctgatcaggcagccaataagtagcaatcctctatgagctctccttcagttcctgtctctagtttactgccctgattgaatgtcttcctgtgcttcccttagtgaaagactgggagtagtaacaagaaataaacatttcctcctctatggtttttatcactgtttcatcacaatacctcaaagcacactggaacaatatctctgccctaagaaaacataagttccttatttctattttattcactaatatccactttcatatcatgcattccatattgcacagcaaacacatccacaaatacaaacaaaacaaaacaaaacaaaacaaaacaagacaatcaaattatttgatagcctgagaggctaaccaaagggatgcaggagtttctacactgataacaaaccctacctacactccagggataaagcttctgatttcactcagcctttggaggtcacaggtttgagagtgaagctatagagttgagtttagatatagaggtgaaagggttggcccagatccagaggaagaaatagaccaatgaatgaaaggcaagtccaaaagggcaaacaggataaaccgacaatagttaagtagaccagcttcttctaagcccagatgaagtgtaggaaacaataagatgtctctgtttgtcagtctttggtgcacaaactacatcatgagattctgtattggcaggagccatcacccatcactaagcccagtgcttctttttttttaatgaggtcagaggaagagattacacccctgcctgggtctagagattacacccctccatggtcccagtacatttcataaattaatagcatggtatcttttctactcttgggaatacttcatttatcaatttgtactgcataggtagggctggatgagatactatttttggatccatctaggcataaaatcatcccctttcctctgaatggaatcagaaaacgattgtaagcggactaagagcagggcacagtctcaaagataatcactgctttaaacagtatggagtaactcagaacagttcctgagctcccatcatgactcgatcacaatctaacaaaggatttgccaggtgttgtcctttccctctgcccttaaataaatgtctaatatcttctcttgattgtttataggagacaaaactatcaaagaattttgagatctttgccttgggctattgaaacatcaagaagtatggtttcatttgtgagaataagaaaacattgctaaaagtgaaggtatttgtaattcattcttgtgacttctggtctgtgtgtgacatttcaacttcccatgttataactttttatatgcttttgtagcaaaaaaagtgggagggagagggaaacagagagagagagagagagagagagagagagagagagagagagagagctaacaaccaaaaatccttccatgcttcttgaggacctggaagtagttagattcagccacctctttagaaattttctcttatagtcaacccaagctctgagaaggcttaagctaaaaggaagcttgcttaggatagttaaagaaagtataagaattaggccttgtctacgcagactcaaatggaataaaagcaactgattgaaaatttcagtgagattcaattgtattctttgtatgaagaaggttgggattaattatgcattgaggggttacctgaaagtgtggattttggcactcatgcacatcagagtgatttaagtgtctatgacttgcatataacaaaatgaagatattgcagtaagaaagaaagtacttttattgaaaaattttgcagtaagagacagaagccaccatgaaagataaaatttctttcacagaagcaagaggagagattgtctaaaggttggggtgagctcatgaaaaattcatggcaaatatttggaagatggctttgtattccaagacatccttcttctattttgaagatagctagtctaatgacacagagaaatccacttgagggaagatcagttcccactgtcacacagaaactaaggaatacagggttttctactcggtagattacaattaagaggattataacctttaaaaatattatgaaattggcaagaggctttttaaaagttctacatgccagaagagcagatgaaagatttataattaaagagtttctaaaaataaatgttttaagtaaagaaaatttaaggagccaaatatcagaggcttgcctaagttgtagcccagctgaaagataggagactatcaaggttgaatgacaaactcacagtgctctctaggagccacatgtgaaagggttggtgagaaagaatatctctttggtacttgaaattaaacttaaaaaaaaaaaatctagccgggtagtggtggtgcatgcctttaatcctagcccttgggaggcagaggtaggtgaatttctgagttccaggccagcctggtctacaaagtgagttccagggctaaacagagaaaccctgtctcgaaaacaaaacaaaacaaaacaaaacaaaacaaaacaaaacaaaacaaaaccaaaaacaaagacaaaaacaaagacaaaaacaattctaatcaagtaggaatttaattagaattaaaatacatatttaaaattgagaggcatgtagttcactaagaattttactcattgttgagtgacatcccaacgacagcacttccacaagttgtggagtgaaatgccagcacattccatgataaaacttcatctgaagtataacccagcatgaacagagatccatttctaagtgacaggctcactcattatttttccccttcactttgactcctatggggctttccttcaatggccccagtagcttcccccttttctgattttggattttaaggatttaagtttcctctctttgcagttctattaatcaacaataggtaaaataactgaaaattttactaataaaagtaaccttgtgctcctaataccaaactgtcacatggggaaacatattgaagtaattcaactcagtaaaaaatcatcgcctgttcgctgatgccagaatggaagaagaaagaatgattatcaacaaaatctgtcctacactgttaagactctcattggtaagactattaatagaatgtttattccattcttaaaaggcttttcagatattgtctggcattttttcatttgtattatacagtgttgttctttattatatattaatactagtagacttgccagtactaaattcacaacatattcataccatcttcactggctgaaattgaacatgggtaaactccagtcttttaagagagccacaaataacaatgcctttttgcaaagagatgacagaatttgccagtagagtctatatatggcttgctaatccatttgggaaattttagatattacagtgggtaagatttccttagagcattcactgagcaataagtatgtataaatggaataattccttagaatgacttgtaaataaggatggaaaattagtgcactacttcagattttgtacagtaaatgcaaattatgctatagaaatttgtcttattaaggtcagataaccaggccaactcccatgttctgccccaggggtttctaggttccagaagtgttctagacaagcaataaatttcccttttcttatgaaatgaccaggctctgactattgcctttagtggttttgaatccttgctccagcagcatatccctgcaggctagctttagattataccagtacagaccccatcactggaattaagaattgaccataatgcaaaacctggagtcatttatcagaagctcttatccattgggagcttgaaatgctctcttccctcttgggaaattggagctcctaaagttttaaaattttacgtgtttacattctgcctagtcaaacacatctatatcaaatgaagaaaaacaatacccacaaagattatgtgagctgtgcattgtaggaaattttattgggtgcaggaagagaatcaattcagaatcccccttcctgcctagctttgcctctaactgatgccatttcttggtgattgattcatgctctcatggttagggaatgagacattaatgtgagtgagtggagatacacttatgaatcagctattttatagacaaattgcatccttaagagaacttccctaacccattccactctggagacccttgtgttgtaatcaagctgatgccttctgagagaagttgctcaggtactgcccttatagaccatctccctcaaattgtttccagagtaagcccagatactgattacctcaaaggaccaaatacaagtcagatagttctaagtataagagctcatattgttagcagaaatcttaataatgttttgaaataactgtttggaaacttaaaaatatgtatgataagaatttccatgtaccatgttaaaatttcaagactgagtctagcaagtataggccagtataatgattctgtctttagagtctataggtggaattgaatcaagatcaattgatagacctccctctctttcttcctccttacccttttacttcctcctcctcatttttctctttatttcttcacacacatgtacacctgtgcttgtatcacataaatctatgtgtgtgtccacccaattcctactcagttgcttagtgtgaaagtctcttttactggccttgtcacaacagcaagtgtttttgagtcacaatagatgagaacatggtgaaagaggcaaagaaaaaaagccaaccctcattatgaagattctaggaattgtatgctattgattcaagcttattctattatgaaaaactgtttccaaacctagagttttcagctttaggacaagagtcctaaaagacaaattaacaatataaaatgtatcaaatttatgatttaagtaatgctatacaagacatgagagtctttgggaattaagtttaaaggacaggatgataaattttggtgaatgttcagcattgatatttaataacatgactgtgatatgacaaaaggataagtcctagtggtaaaaaagggggcggggttagaagcaaattagtcctgttttctggaattcttgcaactgtcttttttcccaagtatatcgtaagttgtctgtcacaggagattgagaagatgagcaaatagtcttttgcatctattcttgggttgtgtattgcttaccatgctctgtacctctatgcttgaacaattttataatagaggttttgattggcaaaataagattatatatgtaatcttcagcaagagttggtactgtgtttatctcaaggtaccaatactattagatgcatggccttgatttaaagactctccaaatttatatcctatttccaaaatcatattagtttacctggcatttaagagatttaagccagagaataactctggagttacatagaatctaaaagtctgatactcatattttatactatcttatattgtctaatgaaaaaaaaattctcagaatgaaaattatttgagaaaaaaagattagaaaactcaacatacattctggatataataaaggatctttcatgagttctacaaactcagtatcttttaaagataaacaccactcttaccttactaaatatagtattaattttcctggatttgtaaaacaatcaaactatgttaaattaaggaagaaagaaaaccctttaaaaccaatttctgtggaagcatttctcatatcaaaacatggtaattaagtttttcaatcagtgtgaataaccttatttttaataatggtctgctgtgcctgatgtagttggagccaattttcctcaacactcacagtagtaataatgccttgtcctcaccttacttctctttctatatttctgtgatcataagccagtcatattcctatttgaaatctctgtattattttccctacaacttatataatcttcccatatccttctgggcacaatctctgaaaaagaaaatcttgtctgctatatgattttgtaattcctgctctaggactgtgtttgtgtctgaattcgtgccctaattctgagaaccctattaagtccagtttgactcttttaccaaggcaccaaccaggatccatttagaaaccttgctgaataagcagatgggaagaatgtaaatacatgtagacttatgccataacacagaccctgaatggcctacagatatgcatgggtgctggtgctaaataagagctggcattagtcttagtttagaactggaattttaaactaaatcttatttgagctgcaagattgatgacctttaaccctctcaaaggaatacatgaataaatgtaaaattttattacattctatagtgcaccttgatatgcagattaggggggtcttttgcattggtaggatatttgtgaagactatttctgaaaaattcttaatgaagtaaacaaagtaattgaataattgagataaaagatgcaattattcagatatgaagtggagttctggtatatctgtgttgtaagtcgattactatagattcataagatggaatcgcacttgtcccttctctggtacccacgcatatagtacacatttgtgttgtatgcatcaatgaatttctcagcatttatttctccatgtgtccaaagtgatccagaatttagtgacaaataagttcaaaaattggacacatactactttctcatacccttcttttttcttgttctaattcacttaagcagtgctatacaaagcccttaatctagtcctaactacagtgccctgcctttctctaacatatgacagttttcttatttatcctactttattcagagtgctattaggtaattgtatatttattattaaatgtaatttttgtaaagcagtgattattctcatctaaacacatatttcaacacaaaataataactctattgaacataaaagtgcttatctatattggcttagtaaacagatttagtgacattcatatatatactaactagatagatatgaagtgctatgttagacattaaaaattatatgttctcaaaactcagtattgtcctccaggaatttatgatagcattatggaaaataatgcactttcttggtataatgtaatgattccaggaagtctaggaattggtatggtctgtaacgttggaaagcagaaatgagttctaacttataggtcatgatgtgattaatacaagacttccaggatgtgtatggtaaagggagtgtttgttggggtgggggacgactcagaattatcaccgtaatacttttacataaaactttaaacaatcaattgaaagtaggttcatcttatataaaacctcaactgtgaagtgagttagaggctcttcatctcatctacaagatacctttggttatttttgaacaagggagaaatatacactaatatatggctgttgaatgtggcataataatcagttgttaaatgttctacttagtgtctgtctgtttgtttttgccaatttgacaaaagcgaatcttggaagaaggaacctcagttcagagagtacttctattggcctgtcggtgagattctgaaacattttctgattaatgattgatgtaatatatccaagaacacagtcagtgatagtttgtggttgggagatatgagccaaataaaccccactcatataaattgcttttcactagtctttccatcaggaaatgaaagcaaacaagcatcaactgaagtaagcctattaattgatgtgatgggttatgctctgatcaattataaattcccacatgtcatggaagtaaccaaatgaaggaggttgattttatggttactataatttgttgactttcaagctcaaatagtacaattgagagaatgccaacattttcagggcaaatgatctacattttctaccagaaacaaaactacttcactaaccctaaaactttgtatttccatgagtggctaacattttaaaagggtacttagttctggttgagtcagcttagttatttgttgtgcttattatattttatttccatttgggagtgatgtgggacaattcttttatgttttataccccaatattttatgattatcttttgttggttgtttttgttgttgttgttttgttttgttgttttttgttttgtctttgttttttaatttgtgatagggtctcttgtattactggctttccttgaactcactacatacctggacacaaccttgaacttctacttctcctgcttataacatcaaacttctaggactaagggtgtgtgccataagacagttaacataatctagagtagagaacctatggcttcatgtatgctagtcatgcattgtgtcatctgaggcacatcccaagcccctcaataatattattccatcagaatacagtttctgcaaagaaaattacccaagggaccacagcctcatggtccattattgtcatcacaatgtatacttcactagggatgttgggtaaaccacagctttaactaatttttaataattaatattctgcctggtaattaaaagtatagtaattaaattcatatgtgcacattgaaacaaaatgattgacagtttagtataataacagtagttagtatttatctatctatgacttaatactaggacaaactttttatctcagttgagatacttgagaaacatcttaaattttcttatctcctaatgagaaatgtgcccctctggaaaaattctatatggtttacttcctatttattatggtttcttaaacacctgtgtatattgacccatgttttattgtgatatgttggagagatcacatgagtgtgagtgtgtgtgtgtgtgtgtgtgagagtatgtgtgtgtgagtgtgtgtgtttgtgagtgtgtatgtgagtgtatgtgtgtgagtgtgtgtgtgagtgtatgtgtgtgtgagtgtgtgtgagtgtatgtgtgtatgtgtgtgtgagtgtgtgtgagtgtgtgtgtgtgtgtttgtgagtgtgtgtgagtgtgtgtgagtgtgtgtgtatgtgagtgattgtgtgtgtgagtgtgtgtgtgtgtgtgtgtatgtgtgtgtgtgtgtgtgtgtgtgtgtgtgtgttatgtaggaaatggaagtgaatgccagcaagtaaggagttcatgctccaggagtgaagtctttgaggagctgcgtaacacaataggcttccttttacgtttttccataagtgttgttgttgtggttgttatagttgttgttgttgttatgattattattgctattattattatgattgctattgcttacctcaaatgttgctagctggtattccctctcggtccacttactttgtgaaaggatacacaaatactttagaagtcttcatttcctgggggaagtttgagtattttgtgttctgttattttaatcttactccttcagaacttttttcaccttcaagtgaactctgtattttccataataaataccttctaagttttcctaccaaagccttagcttgctctcatgttacatccttacacacttgcagatacaagtgcatgaaaaacagtttgctttcaatttcatgataaatacaaactgcttgatctcacaaatgcttcatatttccacattccaggccagttgtttgcttctcacattttaatgataagaaattatactcactctcctctctctctttctctctctctctttctctctcttccccacttctccctaacccttccctctttctttctctccccccaccttgtgtgtgtgtgtgtgtatgagagataaagagagagacagattctttgctgatatcaagacaatcttttgaaaatatttcacttgcaatatgacataaccatatatagatatagctttcatctttcagtttagaaccatatgccattttataaacctcatttaaatgtgaatggattgatagatttatataactcaatggaattctagtacaaaagtaattaataaatttggcaaatacgctaagagtggcaaatgggtttcatcctgaatgtcagttctgtctgataaaatgccatgatcccagttactctaaggaagattttcacctgcatctggttcaccaggaaagaatgtcacactcaattagtgttgcctttgatgtgacaggaatagcaattttggggattctgggaatgatttcatatagcttactaagagcaagaagcactgacggatggagaattactatgaccaaggtgtttagaatgaaaataaatgtgcatttgaaagagacatgtttatttcaaaagatgagcggaggtttagatgtcagatggaactagtaagaaaggtggttgtagaagttatgtgtgcctgagcctctttcctccaagtgttcttcctgggcagtaatctggaactctttatagtaactgacgttcaaatctaagtccctaacattttagcaccatgttctcactgaattgtttcctcgtctacacaattaaacactgggttggttgctgtggtgtgtaggaggtgctcctaatgctgggtacacatgtatcatattcagtagtagctgctgctgtgttttattctatcagcaaacaaaatgagtgaattctgacagaatgaaagctcttttgaatcagtaaacactgcaagcttcctttgatgctagcttcccccttgtgaagactggagagccacagggcagggaagcaggttggctgtggcctttgaaatgctttggggaaagctaaagggaaataatgtgcagtttcagttttctggtagtccttctccctcctcttacagtattgtagctgtgttctctgattaaagtcagttatttagttctttgcttattcaaggaattcttacattaaaaactgtatttctcaggcaaaatatttttatgtttgaatgacttcactagattttaccttcccccacgcccactcttcaggaattgtcacctattaacatttttgttcgaacatatctaatcgagaaggcgacttttcaggttcatgttctaattgatgaaaccaataattaaaggcatctgtgtcaaatcaaaacatatctagaattcattagtgcagctgtgtgctagggaaaccatgtggcagattggattggtgatgacataagagagtgatttgtccttcggtctatggacccccccaaacctggcagacattcagcagcttgtatatgttcgaggaacatctaaatctaaaaatcaatgcagtctttttttctatgacactgaatctgaaactggttctcccatatctgatgacattagctttcatttgtcttgtctctaaagtctcaggttgtcaggtttttattattgcctcttctctgcctttctcacaggattttgtggctcacaaaaaccctggatgtttttgcttttaaagaagacaagtgagcctttggcttgacttcattgtttatgaaagtgaaggttccatttataatagcctgctctttagaaatgtcactgttatacactcttttctttgcaaaatctgtactggggtaactgtcagaaggtcccatgtagcacaatggccagctatcacaaatgacagtgtcaacatctcggtgcattttaaaactgcatatcttaattttaaaagttaacctatgcttgctctgttttaccaccatgtgttgttttagtttttttttttttaattttttgtctgttttattttttatttttattttgtacatactcaaaatcctgacacattttgagtaggcactctgaaagtgtttaactatcacagagaggtctccagtaaagctaaaatttgaacaatatactcctgtcctttgctttgatcttggtttgttcctgttgcaatttggccttggagatagatccttatgtagctgatagttgaatctccctcatgtaaagtgtctacttgtcaagtttactgctaattatggtcccaaattcattcactgattttcatagaaaagtttgaaaggatactgtgctatctatttcttacaattgacagtactgaaacacactgcgaaaagtcacatgtcaaactgaacgtaggtctttcgaactgtaaaagcctttccaatgtattatgttctttgtacctcggaatctattctttgtgaggaaaaaaaccaaagtgatacaatgttatacattaggaggcaaataatcaggattttagaatctgttgaattataagaaaagatgtatgaagaaagaacctaataaaaaggtgttgtagggccccacaaattaaaaggaagtaaaaactggacacttcctttaatctttaagagatcacaacagaagtgaaaaaaaggggtggtcataaagtcaagttacattttcaggtgtgtgacccaattttagacctggagcaggttcataaaaggcctggcccagatccaaaaggaaacagcggacagcctgccttcgttgacactcagtcacatctgcccattgtacaataaatttgccttgatgcaacagcatttaagaaattgaatgaaaatgttcatgactgatgcactacaattagtgctgaaattcgttccctggggaacgtaccaatcaactgactatcaaagacttacacaagtactcacacaaatagcttccatgccaaccatgtttgcatcctttccacttcttgcaatcaaggttcattttgaagcttctttccaggaatcaggacctcagtttgcacggggaacaggaaggagatgtgttttcttccttttagggtggtgatttgaaactaataactctctggtttttggaaaatgagaaataaatcttgccttctttagcaccagatttgaacagagcgtaccatgcgttggcataaagactcttccttgctgtcgctttcatttgcatcctttgaaagcacaaaaatgatccagatacatgtattcataaagagaagcattccaggtagtgcattgatgcagacttaatacactaaggtatatttacaccaaagtaaaagcatagcacagtaacaacaaaaaatttagtattactccttatactgttattaaaatgagttctctagatatatattacaatttttaaagaaaaatctaactacttccagccaaatatattatttcactaataatatgtttttcattcaaatgtatataatagaagttcactggcatatggagaaaactattgaataaatcttctgtaagcataaatttagaaacattgcttaggatcaaaggaaactccatatctcaatctgttcttcctaactaaggtcttttcatgcagaaaagaatttgaggttctgttgggaaaattatacaacttgctttctggtaagtcatgcatcttcactgtttgacatcgatcaaattggcttcttagagctttgcactatatccttttctgtatttgctcagtattgttcacttcaagatgttactgaattacttagttgaggctggacaacagatatatcccttccatctaagtaccctaagtaaagttccctgagtgccacagtttcctgatcctaccatccttactgggcttgccaccaatgatctttcgcttccattctctgtgccttttccactaaaatttgattttcagagtgagagtttgagagctgcatctgctctctacaggctactgatgttaaaagtccctcatctatgacagtcatttcgtctccccacttcacacagtgagggaagaactggtgtacaagtagaaagtgttgacatgctacaaggtgggcaaagaaagcatggaagttatcatagcatctaccttaccaaggtctctgctttctctctttgtgtatatccaatacacagctgggtggttagtctctagtcctctggagtatgaacattgtttggtgttagaaacagagcagatgattttcaagagaaaaatcagaggctggtttgtggacaagaaatgatggggagaagatgtagcttttttttatcgttataactaaactgctcatagcagattatgaatccaaacactgaaagtggtagcagactcaatagaaattcatgagttaaaatttgcatcttaagggcaacagtagctcaaaaaatatcctcctgaaaggcatttcaccttgaagtattgtcatcttcagcagagagtgcctctgctgctctggagcattgctaagagttcagacacaattttgcatttggcacaaagccagtcaccaaaatcaagagagaagtcgggattcaggctttttttttttaaattggatattttcttcatttacatgtcaaatgctatcccaaaagtcccctataccctccccactgccctgctcccctacccactcactcccacttctttgccctggctttcccctgtactggggcatataaagtttggtaggccaagggtcctcgcttcccaatgatggccaattaggcatcttctgctacatatgcagctagagacatgaattctgggggtactgattagttcatattgttgttccacctataggattgcagaccccttcagctcttgggtactttctctagctcctacactgggggccctgtgttccatcctgtagatgactgggagaatccacttctgtatttgacaggcactggcaaagcctcacaggagacagctatatcagggtcctttcagcaaaatcttgctggcatatgcaatagtgtctgcgtttggtggctgattatgggatggacctccgggtggggcagtctctggatggtctaggatcaggcttctttaggtttccctcagcattgtagagtggcttcatattattttcctttttttctccagacaaaaagatatgatctgttttgagcctcaagcattcgttgcttacttttgttagttattctagttggcagaggcctgttacggtctgactgaaatgtgtcaggagcagcaactgctgtaaccacccccacacacatccccagcctctggcacagttttgccactctcaagctattgagggaatcatacacaaaatgcttcttgacactgggtcccaaccacacaaaaagatcaagtagagaggtggaagatgatataatttgcttagaaagggaagctaagtctatctatcagtaactttcctttattgagcctcagtctgcagaaatgagaaagacatagaatttcagatgaactacctcctactggcaggtgtatcagtggtgttggcaatctactgcaaacttgcatagagcttgagggccattttaccactcacagaggaaagatatagatcatgcctttggaagaacagaacataaacgttaagtaattcagatgtgggccatcataaaagtacatgcagccacgcagaagtatatttccagttccagttccaaacagcttcaggtgcaaaagagaccataagacacagcttcatggatatatatatatatatatatatatatatatatatatatatatatcacaaaagctcaacacaacacacacacgcacacacacacacacacacacacacacacacacacacatatatatactcaatatcataaaagaagccttggtctaggaatatgggaagggtaatgaatgtcttaatgatatctaattttcatctatccagtacttgggagcaagcaagtttaaatttgaaaatgaggacaggaggaatttctagacactaagaattaaatatagcatcaactaatcttgtgatatagagtaggtctctcctataaaaataaattatacttttgtcattaattgtaggttgactcattagtttatttgttcaaagattgccactattttataccataagtttttgtggaacatagatttttggcaagacccttaggtcatttgtgagattctaatggaaaacttgaagcaacaattcattgtaccctttaagatttattattattattattattattattattattattactattattatttaatttgattatgattaattgagaatttcctacaagactgtgcaattttcatcaaatctacacccatcccttttttccaactctttccatagacaaactaccatttttctgtgtcaattttatgtgcttttgtttaaatctagagactgtttcttgcttacagtatgtgcttgaatgagagcagttattgaaacacagacatcctgtcaggggctgcatccatagaaaactgatttctgtcttccatagccatctgttgcccatatcacttcagctagaggtgggaagttgatgtcctccccatccctggtggaattttgtttggcttgatattgttaatgaagtttctgttgctgtaagtcaatgtttgaaagatccatgtcatgactgggatgcactgcttcacggaagttctctactacctcattttacactctttttccactatgatccctgtacctttggaggtggggtcatgtgataaaggtgttccatttagcactagggatgtcatagcatcttattctatgcatttcgatgggttgtaagtcactttattagttattcttctgctgttgtcaatcaaaatttctctgatggaagataagagataaactaatctatgggtacaaaaaataatcacataaattatccactccataaatcgtgatcacaagaagtacacattaaatatgaatatgcaaagaagcacaccaactggttgtcctgaaaaagagggtggaaaagcttctatgatgacagaaaaggactatgccatgattaatgtaagggtaccctgcaggtgtcgaggcaggaaagtaaattgcaaagaggtaagaataaaaacttggttcagatgatttcatcaatctggcccaagatttcagggagtccgatcttaggtattttattcctaacaaattaaaacacagtataatctgaggggaacagttttcccggtggtgcacaggaagtataattacattgaaattcaactcaggatacacgtcatttcttccaagacgatgggctatagaaataggctacctatactatcttaaggcccttggaatgtgtctagcttagtcttggtcatacagatagcataaaggtcatttgggcctttagccacatcttgtaaaggttgagagagcttgggagatcctctggttatacaaataatataaggtcatttagacgatgaagtatctctggtcctggtgtgggagcttgagaaactcctggtttcaagagtcatttaaattaacagtcaacagatatcctgcttgtagtagcttgatatggcctggcccaaaagataacataagtcactggactattaatcactttgaattcccagtgttctgggtggaagaacaaggttatttgttttttatatttgtttttttttcctacatatttccctttggaaagagaatcctgcatgtttctaatgttcactgaaaggctgagttgattagagaaaaacaaaacaaaacaaaacaaaacaaaacaaaacaaaaaaccaaaaaactccaccaagttttggataggttttataaggagatcattctccaggctcaatagtgatatttaatccatgttctaggccataaacttcagtgaagaacttaaggtctggaaagaacacacctgcatggtggtaggcatatagaaactgaggccactctcctatcccccttggtaacatgtagtgtaaagtgacaaactattataaaaaggacaagtgtagccgcaaaggtgactgtttagtgtatattgggggatataaagaaagaagaataaagagaacaaacatttgaatatgtttcaagacagaactccatggtaatttgatattgataattagaaaaataaagtgcttgtgcaaaaaaaaaaagtctaatttaccctgtaatagcccaaagaaaatcagataactatagcaatccaaaaataaataaataaataaaaatggtgttaaaagataaatttaaaaaccttgattaaattcattctgccctagccctaatgtgcacacctttgtttttactggtagctaatttagaaactgcatttgaaaaatcttttaattgtaccttaattagaaagctaacatttttgttataagatagtaattaagagcacaggtattgaactctggccccctgaggattcacatctgctgtgccatcactttgcttagcaatcttccttacctccacatgccctagatttttcttttcttttgtgaggtgggagtaataatagtacttttttcctactcggttgcaaaaattaaaagagctgatgtacagatgaagtttatagaagagtgaataacaaacatacggtacatattagaaataaaaattccaaataaacacactcagataacagttaacaaagctttactctatgaataaagaaaccaccagtcaactgagatgtaagtacatttagctgtttggcactatttcagttggccacttacatatttgtattcattgctgtgtataactgtgtatacaggaccataccacaaccaatctatgtcattatgtaaatatcgatttgcattcttcttttaactcaaggttcagttcagattggatgtttattaagcaattctgttttttctagcttttataagatgtaaaattatcaaataaaaatgttgttttgcccagttttttttctgtcccctgtgttgaagacaaggattatatttcagatgtgtatatgatagtttggaccaggatggaagtacaacgatatcaagagaaagatttaattctggaaaataaacatgctactatctatctcacagtggtgtgcaagtgtaaaattaagcaagactggtatataatatacccaacagactacttaagaaatcataagaggtatcctgaatagccaaatatttaattggtaccttaagtattatggattaagtatcgtttgattaatagcagagataaatttaaatatgtagcataacatcagagactggaaactgatctacgccttttattgagaatctgcgaattgaatttgctatcaactacaaatctcattctttccaattaactcttccccactacttaagcatctgaaaagagacagtggtggccacaggagtttatcaccaaggacaggaagagtgattttagtggtgaactatgataaagacaccagattaccaatttagagacccaacattgaaagcctttagcttttgtgtttctccttcctgtaacagacaccccagcttcctgattttctccctaattcatctctctcctgatgagagagtaagaatggcttagaaatggatttgctaacatttcaattactcatgctactttgcttgtgggcaatcacactaagctgaactagcctagctctcagacgttgtgcaacaattctattagtccttttattcctacctctacatgccaactaagcttgtcatggacatgaaagatattaatcacaattcattcatgtggtactgaacagggatgctaatggccttgttatccatgatttcataagatttcatacgcctgaagtatagagacaaaagaaagctatgtgaaggaaatatttccagagtgtcttatcttctaaggaaacatgagtagaaaatttagtactaatggaaaagatgacaaaggaggaatatttcattgtaactttctactctctccctaattttgtcccctacccctctttttcccaacaaatctgtgcaatattgtgtgtgatagttccaaatcaagggggttggaaagaaatagaacgaaaaggaaaggaaaggaaggaaaaggaagggaaaagaaggaaatgcagttgttttattaataaaacaaagtttattattacatttttgtaacaaagaaatccaagagaaatgataaaatacatatttttatacgtagattagactaaaattgttgaagaactcatgttatttttttcattgtgattcatgtctattatgtgaagttatcacttgcctgaaagtgtgttctcattgacagtgttctgttcactatgagggatcacatctttccttatctttataactcttcttccttctcttcattactcttttccttcttgcctctcttcatccttctaccacatctcactgttctaatgcatcactgtttcttttctccctttgtcctctttctttttcattctcttctcttttacaaccacagtgtcctcaacatccaaacatatctcatttgctccttagaacaatgcaatgatgttaaacttttattattcagactctgttttcaacatgaggtttggggaaggcttagtaacttgagcatggcttcctgagactcacttaggtagcagatctcaaatctttgtccatctgatgcaagcatctgcttatgcacaaagctcttccttctatctcctgtggtattctaagtgatattccagtgatgcttgtatttggaggcatagacaaaacactgcttgtctgaccctatttctaaaggtccaaatgtaaaatcaatgaagactttacagtaaatacaataaaagttggcagatgttatttctactaaaaatttaaaagggtatgtgctcacatactaaagaaaacacagagacaagcacacacacatagagagactttcaaacactaccctacacttataaaattcagataagaagaatccgttgtttgctcatcagagctgtagtgatgaacagagaggtatgatgtagttaaattgtgaagaggacagagatgagatagaattgaagactgtctgtaaatcatcccagaagtgtgctctgtcttatcatctgtcaagtctattgaactggtttcacacacacacacacacacacacacacacacacacacacacacacacaaataaacttctgcttatgctgccagaatctctcccactcaaaatatgccactcttactactgcccagtagataccaagaggaaaaggatgttgtagaaggatgttttcaaattcatgcaggcttctaaaactacatgtggaaaccatttaggccatcctcaaatttcttttcactgtcctattttcaaattagaggaaaacacatttctttccatttacctatatatatatatagatgtgaatatacattttattatggattctttttttttaaagatttatttattattatatgtaagtacactgtagctgtcttcagacactccagaagagggagtcagatctcgttatggatggttgtgagccaccatgtggttgctgggatttgaactcctgaccttcggaagagcagtcgggtgctcttacccactgagccatctcaccagcgtgaatatacattttaaatagatgatttttaatggcaaataaaaccttctgaaattgtatattagtagaaatccaactggcttttaactgctgagttttagaaatcataagctctttactttaatctaatcaactctttaatagtttaatttttcccaggttttaggtaattgacagtggattggtgccattatgtatttaattagttgcagttcatttccaggtgtcattcctgaagaaaatatgtcacatttctgagttgagtgtgatccactcctctgcaccatgtgtcgttttgcctgtgtacgagtccatctacttaaattcaatgtgtctgtatgcacataaacaaagagagaaaaagatggagacacagagagagtctcaactctgttgctagctagatatgactaaaaataccaacacactcttctcaattcaatgctgatctctaattataacatcttcaaattatgagtttttatgttcttgcttcacctggggatgacttgtcttagagttctgtctctgtggaaggtacagcatattttctttgtgatcatttaactgacattaccaggtcacctgctggatgcttaagtcctggtctgcatgcctgtggtcctatcctggagaactcctgagtcttttgggaaagaagaacaaacaggccagtacttaaaatgcactgggatgagctatacacaaagcaagccaacaaacatattgttggaacattttttttccaggtcatctactgcactttgtattttaagggaatatttttaatagatgctaagccctaggttgtcaatactattgttgttgctctatagatagatgaactgaacattaatgacattgtttcaggaaatccaattccatggtactttcaaaattagtatcattcaaaaatatttgataaatggatggattttcaagaataggtaaacacagagagttatgtaactagcaacctggatctagagacacaagtattgtcatcacctctagatatggaaaggaatgatttcatgagacaatggcagaaactttgcaaatatcacattaaaagaactggaagttgtttgaagatctcagagagagccttacagagtgggagggacagaaaggatatgcaatttagttttcctggctctctcctgatttcctgtccaggtttccagagataaagtcaattttatattaaaagggaaaggagtcacttgatggtgtgatgtaaaccacagtcctatcagagagaagagaaagaagacaagatggtatggagcataaagcatgtaggctatttggatatttgcagatgcccattttgcagaatgcaagcacagtttttaatccagcaaagattctgttgctttcccccccatgccatcagctccagcaactaaagggtattggcttccaacaccttacattttctcacattagctgacaacggtaccatggtttcttcctacactttttattaaatatctcttttataatgttaccatatgaagtaattggctttgttacagcattttcatgcatatgtatcactattctttcttcttattcattcatgctcacgcccacatgcagctctgaagtatcaacccatcctcttcttgcaggagatatttcccaactgtttctcatgaaatgatctgtctgttctctcaaaaaaaatctcttgctctcttcttattgtctcctttgtatgtaaatgatccattgacccctcacaaacatatttaaatcaagactctggatgaacaaataaatatacagcatttgtctttgtaaaactggtttgctttacttagtataatgatctttgttgcatccattttcctgaaaatggcaagattttatttattttgtagttgaaaatttttccactgtgtatatgggtcatatgttctttataagttcatctattgatgaagctctagtctagttgcatttcttagctattatgaataatatagccacatataagatgtgcaagtatctttgtagtgtgccacctttgaatcctttacgtaagatctactcttctgttcttcactgactaaagtcggatttccaacattgctcaaccactggaaactccttcccctacattttattttattttttattttttattggatattttatttatttacatttcaaatgtaatcgcctttcctggtttcctctctgcaaacctcctatcccatcaggttccctctgcttctatgagggatcacctcccgcccaactacccactcccacctcaccgccctagcactcccctacactggggcatcaagccttcacaggaccaaggacctctcctctccttactgccagataaaatcatcctctgttatatatgtagctggagccttgtgtaatctttggttggtggtttactctctgggagctctgggggttctggttggttgatgttgttgttctccctatgtggttgcaaacccatttagctctttcagattttccccctaactcccccattggggtctgcatgctcagcccaatggttggctgccaacatccacctctgtatatgtcaggctctgacagagcttccagggcgacagctatatcaggctcctgtcagcaagcccttcttggcatcagcaattgtgtctaggtttggtgtctgtatgtggaatggatcgccaggtgtggcagtctctggatggcctttccttcactctctgctcaacattttttcctttagacaggagaaattctgggttaaaaaatttggagatgaataggtggccccatcccccaatcaggggcatttcagctaatctcttcctggttgtgtcctgggagcctcttgctttcctgccatctgggacttcctggtggctgcctccagttccccatcccccattgctacacacctctgtttaatttcctgacccttagtctatcatgccagtctcttcccatacctgatcctgccttgccctcttttctcatcaccctcctctcttcctcctaagtccctcccaccttctacctcctgtgagtattttgttcccccttccaagaaggaatgaagcatccacactttggtcttcctttgtcttgagcttcatgtggtctttgaattttatcttagatattccgagcttttgggctaatatccacttatcagtcatactatgtgtgttcttttgtgatgggctacctcactcaggatgatattttctagttccatccatttgcctaagaatttcatgaagttatttaatagctgaatagtactccattgggtaaatgtataaatgtatcaaattttctgcacctccttttttaaataccctgattagctaggaagaatccctgctatctgcccatccacccatgtttgattataagggaatgcgtatgtatttctattatataggaaaccatcattctactttttctttcttgcattgagaagaagcctccagatggcaatggaatttcatgatggctgttttaattcatggtttctataaaaaaaaatgagtaacaatctactaacgttaaagcatatagaaccatatactcttactaggattttaccttatttattcaaatacacattatttaagaacttgttatttttatgtctccccttttttttcaattggacttcagtcagagctaaatgtattcatacatattttctttctcactatattgttgatcatccataggtctgtcttatcttcagataattacaccatgcaggtactattccttaagtgctcaataaccttttagagtaaatgctcttttgtctgcctgtttgtttttttttgttttgttttgttttgttttttaatttttatagttgaacattgtgagaataagaaagagtatagctgatgaatgtattagtaattaacaggggggggggctatatagtagggtttttgacttccagaatctctgtgtttgccgggcggtggtggcacacacctttaatcccagcacttgggaggcagaggccatttccccacctcccaatgtaagagatccatacattgtttctcactcatcagagaaaaccattccctacaaccctcccatgaggtacttttctatgtgcagaggcaataaacacctgacttaactacttcaccccaagcctcatcttttcttaccaccataatgagtggcaactttcaacataactttggaatgggctcatccaaaccatagcatggtagttcaaaaactttctcaagttaaagtggctaactagtactagacaatgagtctagtgagtaacatagattcaggccaatgctgtgatacagggtggtatagaaaaatgattgtggtaagacaatggaattactggtgacctaggctgatttacacagtgtcaaacactgaagtaattcagatgattagattctattagcttaggttaatctagattgaatcccaaggccattgtaccattgtagtatgtgactgattcatgtatgaaattgtctcctagttcttacctcacttctaggaagttacttccatgcttataaatatctcattcttttatgctatatacatgatactactatatataaatattctgtgctatcaactggtgcttacttaaatctttgcatgccttgactcaattagttagaaaatctgcctcatagcagtttgatatctatgcaaatatctacaagttttcagctattcctagtactttgaatttatccagaattagtcttctattttaagttctgctatcttaatttttaaagagacaaacttaatgctgaccttctgagtgattttatttcatggattattaaattacaccaatgtgtagataaagtaagctttaaggctatagatactgtttaaatttaaccctctattgaactctagcaaacaatagaaacattaatttatatattttcctttgagtaatttttcatgagtactttaaggactgttctcctaagtattattaagtattagatagctgagatgaaggctttaaggtagtctttctgcaagccatctttggagcccatgagttgacctcaacatttatgttctgaataaagtgggcattgatttacagtctcactgtctataaaatgctttgtcccaaacatgaaaatgatgtctgttaacatgtgaactgcactgaaaagtcctccagaaatggtctattttgaaaggtataggtcaccacactctcacatcaaagtgtgtaaacactatatgttatatttattgtacacggagcaaagactctcactgtttttattctcaaggagaaatttccagagttagaaagaggacactgcatttggtagacaattgttcacttttctcatacttacattcccagttgtttttaacatcaacacaagactgctgtaattgtgcacagcacctgtttacacttgcaaaccttcgtatatgcttttgttggtcccagagatatttgtagcatatgtttcccactttcccttttgctccttttctcttttcatttccactctggttatttatgtttttcttattttttttttaccctctcttaatctagcttcatgatgagatgctagttcactgcaatgaggaacttactttccctgaagatgtaatttagagggcttgatttaaaataggcactgcagatgttttcaccaagtgagtcctttaaagcatctccttgggtgagcaaggtcctctgcctttgtgttttccacggttgcatagttagcatccaaattaatgtgcagtgatgactgccctgcaacaaagcggggactgtgggatgactcattgcataaaatgcatttatattcctctagcaatctgtatgtgtattctgggttccaaaaaaatatacacagatattctagggctaaagcccactcacaaacagccctttatgcagtatttttgcactattattacccacaacacaaacaggactgcttttaacaattctacaaattccagctttatttgcaactctatgtactgtgctgttaaaagtcattaacattgttttcttcacttaaaagaaattaaatgtgtctcataaattaaaactttaacatagtttgtgtctactaaaggaaaggacaattagaaattgtccaaattaatactttggcaatccggcagcaaccgaggctatttccaagttgactacaaagaaaataccctgtgtttatcatgtgtaattggcaattgctagaaaatgatgtgatatgtgaatcttaaagtgatgtaacattttatatactttttaaaataacagtgggttatgaaaggttatagagtagaatctatgatagataacattataattctttacaatggaaacattaaaagactctcaatcagcaacattaccaaacataaaaatatcccactgagcaggctctatcaagtcaactcactatggcataaatgtgcacatatattggcaaactttttatatgtatgagttttttatatcttttgaaatacatgtacatattaaacatggtgaatatataaattaattttttcagtttatctcagtactttcagaattattttgtccttgcctttcaaatactttacataatttgtgtgtgtgtgtgtgtgtgtgtgtgttgaggggatattgaagtatagggagcagacaaagtcttgagtgatagtgtactgttttcataaacaattccatattaaggaccccattgatttagacctatggaaatggcaaaaccctggataaaactcagggaaatgccaaagacttgccctggtccagttatggatcttgactgaaattattaaccacagcttccttcgatcacatgatgcaggctgacaatgctctcctacagacccagtgatcagaattatctagcttctctccttgatcacctgcatataagtctgtctccacattcagctgtatatactaatgtactattttctgtgctgcttgtgccagcattatagtgcatgtaccacagaatccgagcttttctatgcatgtgcctgtgatttctttgttccctgttaccccaggaagggcaaatccaaagccattcaggtctcaatactagagttggaagacaagaccttccttttactaagcaacttctctactattgaattgtaccattagcaactgatttaaggtcttgcatgcccttctgggccggaagtttctcctcagagcatatttctatccaatagaaagggttggtaatatggtagctggcaagtaagttagttcacaagatctataaggagtgtcagaagtgaaagtcctatgcagagttaaattgttctataaaggacagtgtcagtgttacatattcttaaagccctgtgtgtaatactggatatgtgtatacatatgtattcgtgatctatattcattcatctttatatgtactataaattgaaatgctccattatagaattattgtataaaagtcaaggttaaaaatgctcatgcagtaattaaaaggagaaaatagaagttaagaccaagatagaatgattccaggacatgcccttacaagaggtaatctgaaggtggtggattttaattaaaacgaaaccactgtgtcacagcagcactgatttgattttgcctacctgcccttctcagaaattatagatttgaaagatgtaattaacagaatattaaagattctccttcattcttcgttacgtaatgagttccctgctccttcccttagccagagctgacttcctgctggtgtaaatccttttaagttgtgtttgaacaccacatgaatcagtgacactaattagtgaggccaaactctggtcctcaactctgatatgagggttctttccccatctgcccttctctgagcacaagctcctggtgtgggtgaaggcaaggagacatagtcccctgtgcccacatttctaacaagcctaaaggtgagcacttatacaccatgaagatttttaagggatgtgtattttgttgattttgaccaatatacacagaagtgatgtgtattcatttggtttcaagcatcagaagatatagacccaaactagggggttattttagaattagttcaactctagtatttgtgttgatgtaccatctcaccctgaaaccattttcattaccagataaatctaatttaaattgagcctcaataagcagttaggaaaagcctattgctgcaagtttgtaatcccaggtattttgaagaatgaggcaaaattcccatgtccaaagcctgtctttctaactaagcagaaacctatccaaaaataaagtaaacaaaagagctgaagaactcttggcagagttcttgcctaatatgcacaagatgctgtgttcaatccctagtgttagaaaagtgatcatagtcatccttgaattttctgcttggcaatactactgctaattacatgtcgcaactgtggagaatacagaaaaagaaaaacacaggaccccaggataattcctagcttgctgattttgttttcttggcgtgtgtgtgagtgagtatgtatatatatatatatatttctactgctgtatacatacagagacacacatgtgaatatgtaacatattctaatgtatattctaatatgtgatctaatctagaatagttagaacacacagtacactattctgagggttttaagtaattagttatgcagtgttttactttcttttacaaccagcactttaagagtttacctttctccatgaacaagaacaagaaagaataaaatcttcagaggaagtcattatattatctcatagaaacatagagtcatattatgagtatgagaaggtatgaagtattgagagagccacttttaagttgcatgtactgttataaattatagcagggagaagtcatttctagcattctatagcaacataggttcaatattccacatattgaaaatgaagagaaaaccttgaagggtttcatcacaaagagaaaaatctaatgatgaagtgcagattcaatgatcctaattaggtcattaaacaaatgtgtacatgtaccttgtaagggatggcataatatataatttgtacatatacatatgcacacacattatacctacacattatatacatgtatcatacagctccttataagtgtgtagaattaatttcaatttagtgtctaaatgctttacaaacatctcacctctctacagcccatcttccagcactatctggtccttatttaattttgtgaagacccttggagtaatgtacacagcaaaataaaacatattttatgcagttttcatctctttgattttgtttaagatatctttgccttggaaaagtatgttaaaaatgagactgtttaaaacgacgacccaaccataccataatatcctgtcttttaaccctaaagccatctggcttagcttccctccattaggaaacccttctctaccttcttctcttgcctttgttctgtccaccctgcttttcccttcacgtctcttgagctttgtgttataaaaaagaattggatgtctcttgtgagactatgctggggcctggaaaatatagaagtggatggatcacagggcccccaatggaggagctagagaaagtacccaaggagctgaaggaatctgcaatcctataggtagaacaacaatatgaactaaacaataccccccccccgcccccggagctcgtgtctctagctgcatatgtatcagaagatggcctagtcggccatcagtggaaagagaggcccattggttgtgcaaactctatatgcctcagtacaggggaatgccaggtccaagaagtggaagtgggtgagtaggggagagggtgggggagcatgtgggggacttttggtatagcattggaaatgaaaatgaaataaatacccaattaaaaaaataattggtgatttcaatgggcaaaatgtcttaaagtagagcacagagaattacctcaagctttgccttttgctgtgggcctctattttttctcaatgtctgtactagtgactaattttcacattgacacatttacccaaatataaaatcacatgtttgcaaacatctaagctggaattaattaaatcaggggtataaatatagctattaattattatctacctcccattattttgagaatatacaaatgagcgatattttccattcccggtcttcacttatacacagtgctaccacttgctacatctgctagtatgttcttgagaaaaacagttttaaaagaatctatgcacttgtaaatatctctgatctggaagatgctagctttcctcatttctgaaaacagtttgcagaattccaggctgtttacaatgtagagagacctaagccttatgggaaaagaccaggaatgacctatattcagcgttacacatggataaacactggggtgctttatgatgatctggaactttcctgttcaattgtttttctaaaaatggaatcaaacccggtctttggtacataattataatgtagaaacagccttgtgaacttatatgagactcatgtacccctaatattaaccccttctaattataagatacagacacacacacacacacacacacacacannnnnnnnnnnnnnnnnnnncacacacacacacacacacacacacacacacaaacatacacacaccttgacatttttctcttactccagtttacttaaagttagcacatcatttgtaagttgactcaacaattaactagcacttgtcacttacaatttaaaaaaattttttttcggagagccacactgctaaagatgtttgtatcctgagcatttgcattgtcctctttcataattacagctgactgctactctgctttaaaaatacattgatagatagaaacctcaaaggaaaaagaagcttatcatattatgcatggccccgagaagttagaaaatgtacagaattaaacaccacccccaggagaaatctgacggttgccagccattccagaacacacttgtaatctcagcacttagaaggctgagatagaagaattatgatttaaagataagtctgggcaagggacccatacctttttgcaaaataaaactaaatataaataaattaatcaatttataaagaccaaagaaagaaagacacaaccaaccaaacagataaacagaaaccaatgcaaaccagaaaacagacctctgacgttcactttacttttcttactctcgtctgataactgctcatcttcaacctaagaattactttttgattgctgtgataaaatataatgacaaaatgcctctcaaggagaatttattttggcttacagttctgtagaatacagtcaataattgtagagattgtataatagcctttaggaacatgaagctggatcagtgtgtattcatccgcactcaggaagcagagtaagggagagaacaggatgcagtgtgaggctatatttcctcaaggtctgctccagcgacatacttctattaagttctaacctctgtaaggtttcgttaccttcacaaatagtactacctacaagggactaagtattcaaatacatgagtctatagtggaaatttcttattcaaaccaccacacacaagtataaaaattatctcttatttaaaactgtagaattgttttgtttagactaggattgcttctttgtgttgcataaatcacttgaaaattttaatgactggctatgttcacattgtattggtgaaaaatcatccatattgtgaaaaacctgtagcttgctcatgtttccttgtggcctcagaggagttctagttgtggcctaccgtttgctgaaaagtaattagctccgctttgaaaatatgttctgagtttaattacaagactgacatcaaaatgcagatctaaatacagcatctattgatcagagtgggtgcaatcatctccacaaaatacatgtctgtctgtctaaatttctttctttctttctttctttctttctttctttctttctttctttctttctttctttctttcttttttccttccttccttccttccttccttccttccttccttccttcctttctttctttctttctttctttctttctttcttttttctggtatatctttttaactgaagttcctttactattattgacctgtacaattactgagaaaaaaactgtaccccgaacagaaatccaggccatactatagttttacaaaatgttctaaaagacgtgtgtgtgtgtgtgtgtgtgtgtgtgtgtgtgtttggtaattttgaaaggtgaacccatcatgacatgtttgctagatgagtgatttccccctgagttagacaagccccaacctctttataattgacgcagtgtcttactaggtagacagagctagccttgctttcactttggaggacaataggctttgatattgtcatcttcttgtctcaatgtcctgagtaattggtattataagcttaagacatcaggcccaacttaattataagtgtattattatctcatataccttagcttggtaggtattcctaagagtccaaagcttgtaatcagaaagcacactgagtctgaagtagaagtcccatccttaaataaggtattttgatataggtagaagaattcctctgcgtaacgcttggagtcctgacttttttgatggctagttgtggacccatattataaatgtccagacatcactcaaaactccttctctcataaacccctcagaactacacaacaacttccttcttggaggtcaatttgaaacatttggacattgtgtgatgggtagagaaagaataggatatagtgctttctgggaaaagagccaggtagtagttgcaggaggacactatcagtcagtacttgtttactcttctctctctgtttgtctctgtctgtctgtctctctctgtctctctgtctctctgtctctgtctctgtctctccctctgtctcacctctctctttctaagtgtgtgtgtctcctattatctccttgacaagtaactttcctccctagtcaaggctggttacaataaggtcattactctttgacaaagctatgatagaagacaaaagagaggtagtggagatgattagagggataatgaagcttatagatgaggtaaggtataaaatgagaatgtttcatctagaaagggtaaaaggaatctgtgagtcaataccatatcatgaaaatgaccacagtaaaaacttcccaagtctttcttcctgaaattggcacttagaagcacaagggaaattaccttgattttgattatggatgacttaaacaaaaaactttgcattgataggcagtgaacacgctggctttgatggagttacttaggctcgttgagctatttcatttgtactgaagtgatataaacaacatacaagcttaagagtttattatagtacctggctttattgaaatcaacagcaaagacatattcaaactgtgaaggttctacatattaaatcattagaagaaaggatgtgtgactgactccttgcaggcttcctcttaatgcagtgggacaaggcaaatgctacatagacaaaatgatgatatagcagaccactaaattgtagaatcatctcaagaacactaggccttcaagagaagtcaaagataatcaaatagaggcttcctagctatctccctttctagggtctagagaaagacatttctgtgtctgttcaaactgtgtttcttgctttaactctgattcaaaattcttaaaatgcactttgccttaccctttctaccaaagagggaaaatgtcaatatgaaaacaaaggtgatgagtttatagctgtaatgctcaaaagctaatgagggtcaagcctgatagaagataataaaagtgggaccagagctgatatctggtgtcgttgtaatggtcagtattctacatttttcccagtattagttatccaaacaaccaaagataatgataagatgtaagaagttaacttcttaaaaaatgagtaccattcattggccaacttgcactcattcatgaatattcattaaactgtgttcctacccaaactggagtattttgtctcagaggacaactgatagagcacaaaaagatataatcatcacccacttctaatttctcatgtttttaggattaagaaaccatgacaaagaaagagagaaaaccccattctatttcaatcacttctgttttctatagccctgggcagaatgtgaaatgtgtagcaatgttttaaatcaatctcaatgggaatacaggaggtgcaacagaaaacagctttcagatttagatttttgtgtataacttaaaaaataaataattgagttgctgtgtattggtgatgtttctaagttggagtatttgaaactcccagtttccacaggatacctagagcctatttcagaaattttatgttagtatagacaaaaaacaaacaaacaaacaaacaaacaaacaaacaaactgtctgctttccttctttttcactagtgacataggtgtctatgctttattacacaaaaaggacatttcagttggaaatcctcctataaaaacagggaagaaaggaaaaatacagggaacagaggaaatgaaacatcatgtggtcattctacatagtaaaaccacaccacagtcttttgtgccttaatattttatgaaaattttgttcaatgctagcaatcagttaaaattagaaaaacacttcacaggcctattttctaccagtaacactttaacattttctattgtctctctgccttgttatgtattatatctgttatcaggtttcctcttaaatggcaccatcttttcatgtattgaaaaccataatattacatggttatattatgtaacctgataatatttagtaattaagacataatgaagaggccttgtaaataagattatcacatttaacatctggaaggtgcttgttagggtatgtttttgccatatcccttttgttgtttgttttgttttgttttgttttgttttgttttgttttgttttgttttgttttgctttgttttgtttgcccagtgctgatgcagaaacaaaacccagaccatcaccagaccggatatgtcgccttgaagttagccttctcatcttccagaatcatgagaaataaatgccaagcgtttctaaattacacagtctcaggaattttttttagagcagaacaaagtgactaagtcactacctcctcccagcttcacacccacacatacataacagttttatcttattgtcctagattcttcaaattgttcagcacagaattatatacttccccagaatttatcataggatttactgcttctaattttctaataactccccaatgttcttctatttcatgaccatgagatctttcaggaaaatcaaaacaggacactttagaatagtttaaactggggaattatttgttgctgattgtaaaatttcttatatgtgtcatcttgaaagctcggttctcaagttgatgcttcaattaactgccattgctcccatcagtcatcattaatgtaatgtagagtgtagccagagaaaaataatttaagaggggatttttgtcttgtatttcaaataagtaatatacttaatcactccattgaactaatataatctactaatactattattttaaggaaattatatttctgtgtcctagtttaaaatttgtttcttgggcctggttttacacatgattagattaaatttttctataaataagcaatattaagctatatgataattcagttattcagattatacaactgatattttttttgtttacttaatttaattgtcaatcaatctatactttaaaacaatgacaagagaaatataacaattaaaaaccctcaacaacactctagaactgtgctttcttttcccttccacaaaatgttgtagcatcatttattctttttttttatattttttttacgtattttcctcaattacatttccaatgctatcccaaaaagcctcccacccacccccactcccctacccacccattcccattttttggccctggcgttcccctgtattggggcatataaagattgcctgtccagtgggcttctctttccagtgatggccgactaggccatcttttgatacatatgcagctagagataagagttctggggtactggttagttcataatgttgcacctacagggttgcagatctctttaactccttggatactttctctagctcctccattgggggccctgtgatccatccaatagttgactgtgagcatccacttctgtgtttgttaggccccggcctagtctcacaagagatggctgataattcttaactcactttaatatttataagagtcttccctaataaagacctgtgtgctggtggggaaactttcatagtgtatacggatagaatttgtttgtgtggacacttctattcctcccatttctaactcctaattatatcttccctttgatgacttatgctacaagaacacaagtgagagctgagcagaagagtatttccctaactatgtctgtctagagttgagaccaccatcatgctcttggtgtatgagagccatcataacttgactcttataatgatgctcatgtatcctacccctgatatttgactcccaactctattatataagaataagaatgatggtcttctcaacatattgtacaaatcttccttagcctgtaagcatcccaaagcattttttgattctctgttattctgtttactcctgcagttagctcttctgtacaggatccaaatcattttccaggtttgctttgctccctgctatgtgtgatcagcatttggtgtcagtttataaaaatctttcagcagagagttaaaaaaatgttcctggctcatctctacctcctcaaccttgtcttcactcttcaattgagagacattattttctttacatttgggtttggtacagcaagtcataactcacacaaaagtctttattgagtaatctgatcattcctttctaccatacagagaatatatatgtactatcgcctacatttgtagctgaacttttaatacaactctgtccataattctatctattctgctctggcacgcctgtgcctttattacatgtaaaatcatgtgagtagcaacttataactctctgcattacaagatgatgagcactatgcaaaacatcatttactataacttagtttcttggtccaagtttttatttcagaattctgatatttaaaaatgtcagatgtatagtttggatagagactttattgacacattaaaaagaactttctaaactttcatcattgctttgaggaagcatttttattaacagatgccaaccatttgtgtaaattcaggaaagaagatagtgaaggaggtattttccagtttctgcccacccatgaatttaacttcactgaaaggaaaaagagtattaaaaagaggacaaagataagcatcattatttgagaaaatataagaatagacaaatgagtatgaggtaatttgaggaattttttttatcatctgtgggaaactggcatgtatatagaagctggttggattaagaaagattgagtctacaatgtagaattatatacatacacatgtacatatacacataaacacatctggagaagtatcaaaatcatgtaatggatgtttatgtatttatatgtgcaaacatatttaagtcatcctcctttaggaatcggaaaggactatcttgtcttcttgagatgtgctgctctgtgccagtgaggtttccttttcagtgtctcccaaacagctggtccacactaggctgtttctgaccttgcatttgggttcttattgcatttgtcgactattcttagtctctgctaatgagatcgttcagagttcgctttgaggatcacatcttaatcacttgatttctgcagacgtttcctttctccaaataaactcttcaaaacgcctgcgattttgtgctcattaacctgggaatggcttctctaactccaatctgaaaattctctcaccatctcatcctgttgccctgatcaattttactttaagcaacaattgcagagaatcttagatgctttctagtataaaaaataatcagaaaccaaatttctgttagcaaatggattttcccttagtgaaaaatcatggatcttgctcctttgtactgtagcagagctaagaaccattaaaacctaatttttgactatttccttggaatcatcaaatcattgtgtgttcaaaaaggtgtagatggcacagtgatgaataaaatggctaccaagtaaatgaagacattagtgttcatttccagagatgttttaaaggactttttcttattttacttaaaattgatgcaatatggttttcatcatgaaaacaaaagctcccctttaaacaaatgtaacattagaactaaatgccagtttaaaaccttactgaacagtgttgtggagatgaatgacgtaactggtacacaacatgcacatcagctgtctgacctgaacaagcatggaaatataggtcatggcattgcaaacctgtaagtacagttttaagaaggctagagaatgtttgaggcaggtagatcttttgttctggctgacagttgaatctagccaaaatggaaatgtctgggttcattggaaataaacctgtttccaaaacataagaaacaaacaaaacaaaaatgtaacattaacaacacacacacacacacacacacacacacacacacacacacaaacacacaacacatacctacacatacacacagacatacaacttcatggagaacaatatataaagatatcggaaatcaaccttggcctcaaaaagcacacactcacataccattgaatccaatcctattctatatccacatatacttaaatgcaaacatatactccttgtgtgtgcgcgtgcacacacacacacacacacacacacacacacacacacacacagagagagagagagagagagagagagacagaaagcattacaaatcatctccatttacttctggatagtaggttgcttctatatatttcttaaaaatctccctttgacaaattgtactaaaattcatacgatttacaagaactgtaatcctgaggtgtaaagcatggcacttctcgtcttattgtcaatgtgtttatttatgggattgtattttcttggtatcttaaaatttattttcttcttatgtgacaaaagaacagagggctgacaagttgaacacagtttttgataaatataatttatgatgttgaaattattctgaaatattgatcttatttcagatgaatttgacagacttttagcacaagaaattctttgcagattttctgatgtgtgtgtgtgtgtgtgtgtatacaatgcatagaggaagcacttgatgtcagaaaaccatggcagccataccctattgcctttttcctccccagagtcatcataagcttctacctgcaactgattataatagcagattcaacatgaaagtatggctgccatccagggcacttgtccacaggaaacatcacatatttccatgacatatctttacttcagacagctccttcagaacacttcaagacatatttttctatcagaagtgaaaattaaccatgggagaaaattaaacttgacttgaaagcatttttccaagcatacagttatgagaaatggtgttattttgattagatgaatctctttacttatccagaaaaggtctttaaagtagaaagagtctagaggatagtcttcagaggtttaacctggggaacacatttgcctctgggggagtaattgttgaaatattaggctctcaaacttgggtaattctcttcccagaggaattttagttgctttttgcagaaggaagtattgaaatctctgacatttcagaagtcttaaccttggcacagacttggatgccttgatatcttcactggaatgagagacaacagaacacatttgtttgagatagacagatagcatatagatatagacagatgggtatagacatagacattgggtatgacaaacttccatagaaaagataaagatagcagaagcagaagtagatgtagagatttggactgaaccaagtcagcacagaggatattttcaaaggtctagtaatggctagggaggtagagccgatcccttgatacaaacgcttttgcagttatatgggacaagacagagttggttggggagcaactgatatttagacagctgcactgggaggtggcagagggctttctcttttgtttctctcactgtcattcccacatgtaattcctaaggaaatcttctcaactctactgcccaaagaattcccaatgttatcagcttttctagtcccatcactgccatcaaagatcacactgtgtgttactgtgtcatattatcatttaaccagtacttaattaatgttcaaagctatgaactgatgtctattattttctttctttttaaaaatctgtttaattttaatttttttcatttagtttttacatcccaattgttccacgccccccccccacacacacacacaccagtccctgtctcacagagtccctcccacaatcccttatccccttatcctctactcctttaagatggtgggtcccatttgggtaagcacccaccacagctctcatacatgaagtctctgcaggattaggtgcatccctgctagggaacagattcctcaaacaggcaagagcttcaaagacacagagagactgagttgttcatctacacatgtagcaggagccttggtggggcctgtatatgctctatggttggtgactgagactgaaagctcacaagggttctggtgagttgactctgtaagtatttctgtggacttcctatccccttcaggacctttgatcttccataagagtccctgacctccatcctgtatttggccttgggtatccacatctgttttagtcaactgctgggttgagcctctcagaggacagttatgctaggcttctgtctgcaagcataacagagtatcatcatcaatagtgtcagggagtgtcagggattggtgcttgcccacgggatgagcctcaagttaggtcattggtttgctattcctttagtctctgctccatctttgtcccggcattttttaagataggataaattttgggtggaaagttttatgagtgggtttttgaccctatccctccactggggcttctggttggctactggaggtctccttttcagattccatatacccactgctatgcatattggctaaggtcgtccatgctaactgctgagagcctctcctatatcaattctctggcacttcctagagatttccccaggtccccaccctggtagctacagacttccatgcaaactgctctaaagacttcccactgtataagaatacaaaggaattctctttttaaatggatgttaaatccatgaacgtccaaggatgaactgtggaagttgtagttataaacttatttgaaaataaaagtttttttttgtataacttaactgtgggtataaagttatttgaaagctgcaggtacctcctaaatacattaacatgtggcttatataatatacagtggaagagtaaaatgccatctgacagcttgtaacgtagtaattataagctaaacagcaatggaaacatcacagtttgtatatttgcttatcatatatattaaattaattttatttagtgtatgtgtctgtgtctgtgtgtgtgaagtattacatttaaggacagcatgctttagaaaatctgagcctataatttaactcttttgtcaacttggaatatttttctcccaaatgatttgatatctgagtttcttcttgtcatttcttcatttataacccactttctgaagcatttttataagtaaatcaaactaaattttttttttgtctttgtattaactccaccaatcttttttttttttttttcgagtcagggtttctctgtgtaactctagctgtcctggaactcactctgtagaccaggctggcctcgaactcagaaatctgcctgcctttgcttcctgagtgctgggattaaaggcgtgtgccaccactgcctggcattcaatcaatcttttatttccctctcagtacatgtctctgagtagtatattattaaacattttgattactatctatccaacctaaatagttaattttcatgatatgagactgcaattctatcaaactcactgtaaaattcttagtgccttgagtcatctctggtgtttggccaactattcacttaatgttaaagatgaaaattaggagagaaatcaatgctttatatcagtgtgataatgttctaatagaactagaaatnnnnnnnnnnnnnnnnnnnnnnnnnnnnnnnnnnnnnnnnnnnnnnnnnnnnnnnnnnnnnnnnnnnnnnnnnnnnnnnnnnnnnnnnnnnnnnnnnnnnnnnnnnnnnnnnnnnnnnnnnnnnnnnnnnnnnnnnnnnnnnnnnnnnnnnnnnnnnnnnnnnnnnnnnnnnnnnnnnnnnnnnnnnnnnnnnnnnnnnnnnnnnnnnnnnnnnnnnnnnnnngagggggaaggagaagaagaagaagaagaagaagaagaagaagaagaagaagaagaagaagaagaagaagaagaagaagaagaagaagggaaggaaggaaggaaggaaggaaggaaggaaaggaaggaaggaaggaaggaaggaaggtagagagagagagagacagaaagaaagaaagaaagaaagaaagaaagaaagaaagaaagaaagaaagaaagaactagattggtggagaagaaacaaaaatgcttttatatattttgaactacatatagagatatccttttgaaattaggttagacacttttaccaaagtggcatggtgtagagaatataaacttttagaatataagactagcatcctatctgaagtaatgatgacataagactgaatatgagggagtatatacagaagagtcaatatttgtcttggataaaggggtggcaaaaagagtcttccagcacatgggaagtaggactatgagtgcccgagaacatctgggtggatgcaaaaaataaaactctcacttgctttaaaaaggagaatgcctagctttctgaaaatttagacctaggcattttctggtagattccttgaggaggatatgatttttttcgaatatggacaaatgttaaataggtttacgttttacaggggtcaattcatttagtcctgtgtgttctctgtaacacagtgactatcttgtgccactctggcatagaacacccactacacaaaggtatacatggtatacagtttgtcttctctcatgatggtattgtgcaatctgtaccctatacatcttatcaggggattaagaaacattatgacaatgtcctagtttgtctcagaaattcagaagtagagatgaataagtaatgtcacagaatcacaataatcaagaagaccatcagtgaaaaacttgaagctttctgaatgtgttagacctaacatctttcgaattttcttctggttagagaggaatagagtgtatcacccttggggatgttttctgactcctttatgacattagcttaatgacaacagccagagacacatgaaaatctgattctgaggcttacagccagttcacagttccctgagagatgattttctgagatttcatctcacagggtaacctgtgttagagaaaaggctttagcatttttttatcccctcttcctttccctgaggatctccattgttactgttcggggttttgaaagggaaacacagtcaggtcagagaaaagacccacagaatgttcgtgccagtggacaaaaatgtgaaaatactgcttataattcatggtggtctactctgtgtcatttatctttacgtgtgtgaggagtcagataagtcattcatgactctgctagccttgaccatccttcatcactacacttatggagataaatgccacagctaccatatgtcctttcagagtagagattcaaactagtaagagcagaggtcaggctcatgttattatttaaaagtgaagaacagtcggagtgtaccatttcctgtgttcacacaccttgttccggctcagcattatctgctatagaaatgaatgtgtagtatctgtacattgatgcacctatagatacctcttcatttcaaatgaaaataccatttccaagaaaatgtaaaccatttatactgtggaaataaatagattaattaatgggagtatttgttatccaagtgattagaggcaaaatgaaaacaatacagtggaagtaaattataagaaagtgtttaaatgtctttttctggtcaaatcacatgtgataggaccaagtcaccagaagaaaaaagaaaaaaaagagtgagacatgatattggaactgtgatattagagaaaacagtgtggaaaccttggctttataagctgtggcacaagagggctatagtgctacagtgaagcaagtgggttctttctcagctctgcacttgaggagtactctacaggacaactaagcaataagacctctttatcactcaattgctggatcgagtgcatatagaaggaagatttttccattgtcatcaaggcattgcttctttattaccttggttgctatcctctataactagcaagaatgtcaaagtgttttccacaaatctgaaccaaatatcagtgctataatggtttattgttggagtttatgtttaaatcatgattcttacaaaaaagaaggccataaatttgaaaaacagcaaggagataatatatagataggatgagggcaggaaagaagaggaaaacaaagatataatcataatattttctcaaaaataataatataaacataaaacatagtaaatattaatatatttgactgtaaatgtgtaatttttacatgatttaagttaatgaactaatttatgtacttttcataccaatatgagcaccctctcatccaagtctccccttacacatctccccctcccattcacacttcccttttcatctgacaagggagagacccctcccctgggtataacatcaagtcactgcaggactaggcacatcctctcccaatgaggccagacaaggcagcctaattaggaaaactgaatctgcagacaggcaacagattcaagtatgaccccactccactgtttgggggaccagtatgaaaatcaagctgcacatctgctacatatgtacagggagaaaatgcctaatctttaaataactcttggtaatacctttgttgtaattaaatttaagttcaaaatctggttgcatttttacctattgctttttccaaatatatatatatatatacaactctcttctctctctctctctctctctctctctctctctctctctctgtgtgtgtgtgtgtgtgtgtgtgtgcatgttaactgataatactttgaacactgaacagaagaaaattcaactgaatattaagttttataggactatttctctggagaaaatagtgaagagggttaatgatagcaaaaatgagatattgaattagaatatagaacagtataattttgcaaagtaaaaagaacggtttgggagacaattttggagctgtctagaatcttgataacagaaataacattatatcggtgttgggttaattgtagacccagaagagaaggtatatgtatgaatatggcctgagttattatgaaaatcaatggtctcaacaaagtgctttgtacatattttattttataactgagtaggttacattgctcacaaaatactaaaatacgttcaatgtgaaaattgtgtttaaatatacacttttatagtatacacactgtgtgctttcaagtgacagacttaagaaagtggttacatattctgatctgaaagctagataaattcaacagccaatatcaaattaatcaggaacaggagtgccctctctccctgtatctattcaatatagtactcaaagttctagccagagcaataagacaacaaaaggagttcaagtggatacaaattggcaaagaaaagaccactatttgaagatgatacgatagtatacatgagtgaccccaaaattctaccagagaacttctacagctgatgaacaacttcagcaatttttagattcttaagtggtttgtagatgccagctaaaaccactgtagtactgcttcgtttgttaatatagagtaaatccaaaattctagcgtggtgacactcaagggtccaggagtccacgaagtaagacatttggagcaggtacacagcacagtgaccactgtggaataagaaaaatgaacagaatagcttcttaggaatcaagtgtgggatatttttcagaaaggactgacaagtagatctatgcaaaatgctactgaactttgatgaatatgaaaattgggacttggtttggacgtgattcagcaataaatagatgtttttccctttcatcctttggttttcactttgcacagttcttgctatttcatgcactttcctcgaggtactgttagtaccatacccatcaacttgtagtcagtccatgcttcagatgcaaggataaccaagatttcttagaaaattaagatttgctaatagttattatgaagttgagtttacatattattcagattaatcacttaaaattacatattaccactaagatctctttcactaaaactcagtttttatttgcttaatgctaatgttgactagtagtaatgaattgctttgtaaatgtgtttcttttattatctgatccaaatgaagcaatcatacacattaaaacacccacttttgaaactcacttgttgagctatcaggatattctccctgctaagacctccttgtccaagttagctaaagttcttatgttcatttcttcctcactgcttaaacattcaaatatgtgctgccttacccagtgttggctcacctcttactaacaatagattcttggtgatgtcaatacccagaccagtatttggtctcaatttctgcttgggtgatttccctatctgcagttgcctggctttcatctcactacaatttgcctgtattaaatatatgttcaaacttgagataaattactgtaattgttaggattaaaaagtatttgtttttttttttcaattatactaaaagaaacacagattctgttgtctagtgtaccactgctttacacactgtgtggttcttaaattttgattctatattccatcctctttgtatagtacttctttaaagaaaatatatttattttttctttttctttttctttctttccttcctttttttttagatacaggagaaaaattactcaaataaaattataagcagatgtgtatgtgaaactattaacatgtaatttgacaatactaattggatgatgtttaactcttaactgcccatttattttaggcattgtctgatttgatctatgatgtgattatgactaggacactctatcagaaagaaaaattgacctgcataagttcacaaatctaataaatgaaaaccaagtgaggactgcagatctgaatccaaaagcatgtttttcctgtcattagaaaagtgcattattccaaatggccagtggttaaaatagatgccttggctttcagcccagagctgtgttaaaatacagtggtgattcaataaatattgtcaccagtggtatctgtgttgttggtcatggcaggtcaagaaatgtgctggattgttctaatgtgtaaggtttaatttttttgtttttgttttttaggttggcaaacacgttgcctatttacttcatagagaccccaatggagaacaaggtgggtgatgattcatgctcaatggtttccacaatatgctgaacactacaatagcagctaacataaagtggctcattatatgctgtcaaatccaataacagcaatgacagacttccctcactacagcaatttgtgaggagtccagccactccaaaaagggactgaattaaaacaataataacaacaacaacaaaccctacaaaatagcagaaataacctatccactgagtcttattttctgattctgtgtaggtttccctttgaaacaggcttcatgctttctgattcaactaaagagataactcaccttgagattagcttctcttgtgaaacctcttcctttagaacattgtgcagaataaataatttgcataggttttggggttcataagcacaattgcttatgtggctctcctttgaggacagctctgatataccacccatcatatctcatcctctgaatagccaccatattctctctccctctccctctccctctctccctctccctcctcctctcttcctctccctctccctcctactctctccnnnnnnnnnnnnnnnnnnnnnnnnnnnnnnnnnnnnnnnnnnnnnnnnnnnnnnnnnnnnnnnnnnnnnnnnnnnnnnnnnnnnnnnnnnnnnnnnnnnnnnnnnnnnnnnnnnnnnnnnnnnnnnnnnnnnnnnnnnnnnntctctctctctctctctctctctcaaacacacacacacacacacacacacacacacacacacacacacacacacacacacatacaaacacactttttttttttttaaactttctggtaccacagcacccacaatggcaatctttcttatagagacctaaggtcaggaggcagcaggctggataaagactctttatgactatgcatccctttgtgtcaataaattgtaatctcgttgaggaggtctacttttatcaagtgtctataaatcatgttcatctcacattactgtgtagtgaccaattcagccaattattagtctgggaaaagtgtataattaaagaagcagatagtgtataatattcgtgctttctctatcccttagcaaaagcagtaacaccgagtagatttaaaaaaatgacacgtttgcttagtgaaagaaggaagaaatgaataaatccatcaatcagatggttctctgtggccaaattaaagaccagactgagaaattctgattacttgaaatcatttttttcctctggccacaaggcataatgccctgaaaatgtttgtttattttggaaggcaaaagctgatctgcagctattttctttatttttatattcaaatgcctataaaacagaaaaacactggagacctattcattgctcacaaatgatctatagggtaataatgtgctggcttttccagctgtgatgcactttggtgctatcttgggtttaattgaaaatatgctgtgaccttggttttgttcactgggcgaagggggatataattggcatgaagcctctgaagaactctcttttcaatgaatgtcatttggttaatttggggttcgcctgagggaaataatgtgtgaagtcctgtaaatacaaggtgctttttattcacatggcattaacatgaagttaacaacctttttttttttaaatcagcattttattttgcaaaaccgatttgttgattcctaaatgctatcagcatgataatagtattgtccttaacagtctcctgctccattataattaaataaacagctttcagattgcagtccaaaaatgtctgtgctccattcttaacttaaggagtttccatagaaaccatgggcagaaagtttaactgacatttattgggcttgaggctatagggagctttgatatctctattttcctctctatcgttctgtatgtgaatcttcttagctttattaaacccttgaaaacatcacttgctccaagtctgctcctccctctcctcttccctcaaccttcctcctcttctccctcctccttcttttcctcttctctgtctcttattaacattgaggaagtaatttggactcagttagatttaacaaatgcaataatactaaaatgcactctgatacttaagtgtaattgtgttattagctggaaatgcttttcttcaaaaataaaaagaattgagagtgaagttaaccaatgtaatgcatgctggcaggaaggaaacattggtggctggttgcaagtttgtgatgcatgtatcaagatcctctttcttctctggatgtgactattccttgatttattcaagcaagatggaatgttttctcttagtttcaactttcagaaggaagcagaacgatagtttgatcaaattaatccagaatagaaaatagaacaaaatagaatagttgttccgggggaaaaaaaaaaaaaaaagactatcaagatccatcgactttgtttaagctgtcacctaacacacttaacttaacagcaatgaagctggtgccacaagtttagatctcacccgactgattgtaacattgtagataggtacggaagtatgccatcttagcttcacaataacaatatgaaggtgaacaaatctgaaccatgaggttttactaagattaaaagtaataatcgtactatgtcttgggacaggtagcagcctgtcatctttaatactcaggaggctaagtaaagatagtctcaatttcaatatctatctgatctatagagtgagtttaggctgatccaatctataaagtgagttcaaggccagcctggaaaattcaatgaaaccttgtctcaaaataaaaactaaaatcaagtgtgaggggctgttaatatagcaaaatactagaccgtagggtctggattaaatatcaattgaggtatcaatgcaacagtaaattataatagcagtcttttgctgtggtttcataaagaagtagcaaaaggagtttgtgctttatgcaaagtttctatagctatttggaaacacagcacataatcagcacatatacattatagcagttcaagggaaagatttaatcagacataggatcaatcactaactacactactggggaaaaatgtcaaacttgcaattattgattcttcatctatatgtcagaatcatgagtcttacttcttggacctgttctgggataggcaactgtatatataatctgcttaacttctgtgaaaatgtgcactatgggctgtaacttctgtcagtctcactctctccatttttctgaggcttttccttctcaatattaattcaaagtataaaaaaaagcaaacaaaagcaatatccatgtttaacttagtgtatatacatatatatatgtatatatatgcatatatacatattagaataatctcattaaaggtttataaagattaaaataacatgaaagcaatggcagaagaaaaaagccctactgagtagggtacaaaatagagattcagggttgctaagaatatgatcctagtatcctgattgagatagctgactttatcctatttctaggagtccttttcaatgctagaagtctcaaattcattattcctaatttatgacatctcttctaagatgtaagggctaaattccaatggatgtgacttagagtttatctttctagtgaaggtgaagggaagatagtccactgggctggaggtgaagaaaggagaggacagatatgtgcatctatctcagagccatgatgagatgcttcttcatgctctcaaagaactggcaaatgaaaccatataatggaaaagtgttaattttgtatagcaatatgaatgaacactgtacgttggagaaaaatagtaagaaaaaaatgccttcaatatattctcctttttaaaagaacctaacaatttccctttcgctgataaaaggtgatggctaactgaaaggttagtaagaattgctgtgatgaaaacatgatgaagtatagctagaaccgagctctatgagacatgaattctgggaagagctgttgcttgtaaactaccatcaaggcatgtacccatgggaaaacacaagtacatagggttaaccaggacaaacatttttcttatcattttgtgggttattggtgctcctttctctgctgtgtgcctgcacctgcttcacaaagatactcctacatttctgttagaagaattgtctttagccacaatctccattttaagttaaatatctaatttaaaggcaaatagtagagtgcctaaaaccacccagacagacctacaaatatctgtgctgttcaatgcagtcctagcatacaaatcagacagcccctttgtcacaggacttcctttcattagggttcctcacatatataatgtgatccatggtacaattgagagtcatatgagtgtggtttaatttcttttaattcatagatgaaaattaactataaatagaagcatataattatcatccatgaattaaatgcaaccacttggctgtcttcatgttagttgagaagccaacatagttggagaaaacttcagaagggtctactgtaggtggaggctacaggcagttgggggaaaaagaagcagttgtctccagagacaaagtctcttgtgggttatctagtcccaagtagtcaagtgggcattcctaacctcatgagcctatagatgatactaattcaactaggtaggttttgtgtgtgtttgtttgtgtgtgtgtttgtttgtgtgtgtgtgtgtgtgtgtgtgtgtgtgtttaacaataatcatcatagaagaagtgataggagttgatggagaaaagagtaagagaggagaaacagaggagtagagggatgtaaatacagtttattcatgtatgaaattctcaaaattatgaaagctttaagaactatgaaagaaaaacagagaaaatacttatagaaatgactgtggaaatgttttaatagaagttcatatacaatcacaaattgtgggccagaattttacctatagacagaactggtttctaaaccctgacattcaaattttacatgcttctgcatgtctgttcacatggcagttgcagccttgagagtgagaatagggaattcagtatcaatagccacactcaccaacatttactttctttttgtggtgagttttacttatttttcattaacctttatctttctactatgcatgtgacagaaataaaacatatattgtttatagaatgtcagaggaagtctgagttacattatttttacccaagatctggaatatccataggcaactgtgccttctgctttctaaaatattttttttgttctttttctgttgcttaagtttatgcaatgtactgtgaccacattcccctactcggttatcttgattcccctcccacaacttgtgacccacttactcttcacaaccagttctacttctgcctctatcttttctctctcccttcttctctcatgtgcatgtgtgtgcatggggggggggcgggcttattttgcacatcctgtgcaattgctattatgtgtcattgctattatgtgtccataattgcccttatgatgccatatccaggagacagcattttatagtgagcctttccaccctcaggctctttttaaaatggaatcactttttttttttaaatgaactgtacagagaacaaagacagatggtgggagaaggaaccaagaaagatttttttttatctaatgtaacaaaggtagattaaatactgatgatgtaaagagcagcatcctctggccttcttcctccttgtcccttccatatgctgaggggtacttggttgtttaatacttttcatgcacttgtctaattatctcttttgtcattgttactacaaaatgttcattagaggcaaaatgaatacagaaacacaaaagtgctttaactttttaagatactaacaaggttagttacgtggttaagtgaaactcattcatattagaactgagtcctcagctcacaaggttccatggtaactggagagcaaacacaggactgtgcagtggggcaactcacttccaatatgcataacctaaagctaaagtgaaggctgggctgtcttaaaatcaataaataagaatccaattttcagatgtctgcatttgctgaatggttccctcttttgtggtcattaaggtgaaacaaagaaatcactgattctagtcatttccattatctgtcttgtcatcactgaggtttcctcattatgcactgttaacagggttgaggttacttgaaactagcttccagttccaattaggaggacatccctgctatctgcattctgattaaatgtgttgcctggaaatcacagaaagagtctattctatttcctccccttgcttagatctcataaacacagactcaattaaagagtttccttatcagacttctgtgggtcattttcctgaatttattaaactcctaagtcaagctaaactataagaattgtggcttacagattcagcaagggcctaaactagatttctggggcttgcccctcccatgttttagacaaaaacttacacagaactcagaacatataataacatgagctcatgagtcctggcaaaataaaaacataagtagatgctaaaaatcatgacactgttatcaggctaaattttaagatcatgcaagctatcccaggccatcattgttgcagaagttttcatggaggacactaatagtttcctgttcctaataagtactactgatgtctcgctctgccttacatattctctcttcagtttcctatcgacgtctgtcacaaagactaatcaagtctcttcagctcctgtatatagagaacacagaactgcatgtgcattttcaccacttgggattatttcattcctcctagtttgtattctactagacttcactacaaggtctcctgactcccattcatgtttaccttcatgcacttgccacctaactggtatttgttttcaaactacccattgtcatcccaattcttcaccctcctcacaactagtacagctgtaactctgtttaaatttttctagagtttaatgtaaatccttgggcagtcacttatcaattgttgaatgctgtaaaatccttaacagaagacaaatggttataagtgaaaataggtgagtacattgcctggctctcagtgggcactcagcaaacattagagagggcaatgtctgtctgtcactccctcagaacgctacatagttttctcattcaaatcaacatatgctactatgtttcaggtctgcatggccttgtgactggataaaccctgttgtttctctctgagctaataattatccactaaggacacactcactcattcagtatagcgcatggcattgctttatgactcaatcatttatgctaggctagttttagtattctgcttcaaatgatcaatgagggagacttacagaattgcaggaattccctctaggtgatgtgttggtaagcatacttagacatatattaacagtgctgaagggaactttaaacattctctttctcaatgctactataaaatgaatcctagatatgtctaatgatttttgctaggggttatatatatttatggttttggttactgtctaggaaattggagctgtgtactctttaataatgaacaaggaagtaggtactgagggaaatattggaaggtggtttttacaatgtgaatgactttgtacacatgctatttattctcttcagattgcttcacatagcaatttaaattgcattactcattacaaaaatccatatgccttttgggtgctattgttgctttgtttgttttcagcctatggaggcaatgatgaccttggcacaaggcatttcctaaggattaatgagcagttgggggttaatgactatcaattcctcccagctagtcatcaatccaaaggaagcaaaggcagcaaggccattaactgcattaccaactttctgaaatcagattcttctttgtctgccttgctaaggactttcattttggatgaacttgttagtttgttcaaaatttttcacttacctggacagggacagaaaaaatgttacccattatttgttttatctatctatctatctatctatctatctatctatctatctatctatctatctatctatctatctatctatgtatctacacacacatatatataacaaatatatatatatatatgagagatacgttcatgaaaacaaatcactttttagttaatatgtatgtcatatataaatatacatatagatatgcagatatctgcatttatatcaaattattggtaataaaagaaaatatacacatattgagttcctttgggctactttgattaccacaatctgacaagcttggatttgtttttatcttttcatccttatttactattcccaattcaaagtctgaagggattcatcccatttcatattaaggcaagctaaaatatgtgccaatcttctgaaatatctttcctcaatatacaatatgaaggctggtttgatagtatgcttgatggcctgtttggagtttttagtatagtttttttttatgaactatcatttttcattgattcttatcacatcattgttcttcattgatgttaataacacgaatatgtctccatttgacaccagtcaggtgatgaccaacagcctgaaagataagtcaacagtaatgtaattttgagtggcaatatccttttagtaataaactaaactcctgtgaaaatgaatctgaaatagacacagtcatagtcctcacctgttgaagattctctggtattttattttctcttcctgcatctaggctcttccattgtctgttttgtctattgtttatgtgagacagaacaaaaaaactgactgtagttttggtgtttaagatatatggcaaatacgtgacaccatggcaacctacatccaaagaatttttctgtagacatttttcctgaacacttgctgaggaactgaatttaattctttcatcttagtaacagaagttgatgtcttatcccaagacaacagtaaacacacttacaaaaacacataacgaattgacacacagagagataccagtccaatatattatttctaaatttgaaacagatctacaagtactacagtaatagatctatgtgcatagaatgtaatcatttttgaactgtaggattctatgattagacaatgataaaacacttgatacaatgaaaacaaaaacaaatatcaaatatttaaatacccttctaatttttctctttattatctcttctgtcaccataatagcacagaatataaaacaagacacacaaacttacactagtttcacagaaaaacattgcacagacatatttctgagttttaatttgtttttcatttggattggttgtttaagtaactgaaaactgattacaaacaacatttttaaggccacctctttcttttaaatcatatatatatatatatatatatatacatatatatgtatatatagtgtgttcataaatatatatacacacacacatatgtatatacatacataggaaatagatcatctgcactactttcaataacttatttaaatgcttattatctaattcatttttttacattcttaattcatttatgttttatattttgggggggagttataagaaatagtcatccagtccattcttcactatttttactgataacagaaataacttaagtcatattggctctcctgaattttaataatagcctttagttatcaattattgcaaaattggtttatctacatggctccttactaaaatttaaatacgttatataatcaataattcaatataacaactatttactaaatagttagatggaatccagttttactctttaagaaacttttgagtaaataaataaggtagccacctagacaaacattgacattcatgaataaatttgctaagtttaatcttggctttactgaccactaggggaagaatggattagtaaaaatcttaagagaatagaattagttatggtaaataggttctggttggacataatttaatgaaataatctgagtgaggaattcaaagccaaaagaagaaaaaaaatatctgaaggggaaatgtaggatgatctgattagaatgtaaaacagaatgccattgttactgtagtaagactctcagtaaacaagtcttggacaatcatatgctatagcaccttggagtgaatacttctcatgccatgttaaggcactgtttatctggagataatttggtcctacagggggctgtctggaaatattggaagacattttatttttcacttctgggattgctgctggcatctagtgggtgcatgcagtaaaggaccgaggaatttattgtcagatacactttgttgcctagtttctcatctgatactaacttcagttactttaagcaaaaacattactgtgaacaattactatgggaaaatatgaaaacaaaataacagctttgaggtaaggaaaaacatgagctaatcatttggtgtcctgtgaacttgaagaaaaggagaagaagagaaagagcagggtctttgggccccagatattatagtatatgcacaaaggatgctacttgaagtataccatgcacatttctaagagctagaatgttctgattgcataatcagaagaatcacacacagagcaatttggagtctgagactcagtggtcctcctcttcactctggctaagcatttagctaaacaaatagttgttataaaaacacaaacatggtactgaacaactctaatcccaccaaataatttgaaaaacaactctgtcatctatattttatattttcataaataatcaatctcaaaaaatggatatgattctaagggattcacattcagacagaaggctcatactagctatctttattttctttgcatcataagaaggcaagtaaacaaggaagccaaaactaaattaattttatgtttagttttgccaagaggttactgattgtgggtgtgtattttttgatttaggagaagttgactttttcttgctaatatgaagttggagctgtgactgcctccttagcctgctcatctattataatgtgctgctttggactgtgacagtagctcaaggaaaccattttttttcatggattttaagaaaaatgttcctaatgggtctgtggagcacattttgcaatgataaagaggccatggcctttaaagggcactcgcctttactgactttatgatttcttatcctctcctttaaaaaaatgggggtgggaggaaaaggatagagaaaaataccaatagctggaaccggagcggtgaaggttacttaccagttctgagggttaggagccatgaagcaaaacatggaaaggatctgcttcctataagtagaaccttttcagacagccatgttattttaggcacaaacagcagatggcattgtttggtcaaacatcaaacagggctgctaggataataaatgaaaagggaaaatgaggaaaatcttctctactttctccatccaaaaagcactcaagaaagatcaagaagagagtgaaatgatctgcaatttgctgtgtagttccagctctttagcaaaagtaactacaaaccagaaatataactcggaaatggatgaaattcttgctataggaatgggactctactagatgctaaggatccattaataagttccaggctcccagaaacagttggtttacagtctcaaccatctacacgctgcctttgtcaatttacccattttctcatggatgcatgctttaacaaatacttgaacagtataattttagggaattgctactaagttatgtgattatcagcactctgataatcttgcatcaaggcttaataggaaataaaagaaacacttgtgtttagaaaaataatatacatttatttatatatatatatatacatatatatatacagtattcaatctcatatatacatatatacacatatatatgaaattgaagtatttcaatattttacagtggaataaccaggtatagtaatttacaatgacattctgaataggtaaatgtaaaaataaaattcttgatgtcactttcaatgatcaaataaaaggtgatatatttctctctctctctctctctctctctctctctctctcttatgggtatttgcactatagggaagcatactgtaaaggacagaggtataccaagttgaaatatttggaaagtaaagaagggtccatgaaattgaaggaataaattacagtaaaactaaaacataacaaaatgaattagaaacatattcagtttgcattgttttacaagaatatggaggcaaaataagaatttcaatggaaagacaacacaaacatgtttatatatttaaaatgcactaaatatatttcatgaagaattagatatgacaggccaactgtgaaaagggagataagatattttagagggtgtccaagttagaaatgaaatgtcatggataagaagggaaatgctaggctatgtttaggagtactgctaaagaaaagagtgctgggcatgatgagaatacagaaaaaataaataaatcatcgaaaactacaatgttgccttgagctacttggtatatgttactagccttgacagtgggacagaggcagttttctgtatatgctatgctatttaattcatgcagtctttacagtgtatgcttatcagatcttatcacacctacttgggaaaatgtaactcatgacagacttttaataaagtttgaatgaataataatggtaaactaaccctgcaacagaagtcattttagtccaaatcctgcttttattccactaagtactactgtaagaaactagaaattctcccccatgtactttaatatgtttctaggttgtaacaaaactgaagctgaatgcatgcctacttcttccacacaattcaccatatagatttgagtagcagcgatgattcgtgtgtgacttcaggatgaaattttttactctagctcggtcctccatctgtgcaatttatatttcatgttcttggagatgttaactaggctgggtcaatttcaaactttgtaactctgtcgtaggcaattcaactgaagatcagcaccatgcaattttaaagtgatgtgtggtgtgtagattattgaagtcactttcccgccataaactggactttccccttcaatttctgttctccacaaaggcagaaataatgtcttcacaatatcccttcatgcttaaaggtctcaatttttttgtcttaaatatatttattgaagccaatctaaacagttatgttagatgtgcagcaagtcccaatggatcaagttatacatccaaatttaactcctctgcatcaggagtccttgactttgactgtaagcttaatttttattcttccttttatgactaatatcaatttacctcctagaccactaaatttcctcagtataaatctgtttctatacttaattatacttgaaatattttctgaaaattatacaataggttatgcctacatcaatttttaactatgactcagaacatttaaatattttctacatcaaattgcaatgcacagatgcaaatatacacactttcatgttctgagtgtgaatttatattatccacattgcacccataacaacattcaaaaattcagaagactttcttgatttagaaattttgtttgcttttttttttttttttaataatccttggtttattttccagagcatagcattatgttggttgttaccacctgggttgtcttctttttttctttttctttttctttttctttttctttttctttttctttttcattttctttttctttttctttttctttttctatttttctttttctttttctctttctcttttccttttcctttttctttctttttctctttttcttttcctttttcatcttcatcttctttttgtctttgtcttcttcttcttcttcttcttcttcttcttcttcttcttcttcttcttcttcttcttctttttcttcttcttctcttctttctctttctccttctcctcctcctccatcacctcctcctcctccttcttcagctttttctttttcctttaataaaccattgtctctatattcagtttttactcatttaatcatattctaatgtcacatataatcactagtcatatattacaagggtgtaagtcaaggtttcttaaaatgcaaatgtggaggcagattctttctcataaaacgcactttctaatacctaaatgtcattttagaaacatttttgaagacactatgcttgaagaacaactgtctgttgacttgacaggtcaagtctgagagttgcagccatttaaaatctgtactgttctcattatcattacctagagctggtcttgagtatatttatctataaaatgttccttgaaattctgcatgcatatgtactcctgcacaaagctcaacattcttggaaggctgcatttaaaaatggggtgtaggcagtattagaaaatactgttaaaacaaatttgatttaaaaaggtcagctcccattggtaatagtgtgatttaatttgagtctttttctcttatagtatttttaaatataaaaagatgctgataaatgatttttcagcagaaaattttattgttgtgacaggaataaactttagtaattttcttgcaaacaaatcagggtaattgtgattaatttgatgagaagaattcaaccagtaaaatgtcataagaatttcaaattttcaactacttttatcttttctttattaacttgatgagatgatttcagaagacaaaaaaaaaaaaaagaagagaaagagagagacacagagagagacacaaagagagacagaaagaatggatagatgttaggtgatagagagatgataaaaggtcaatagatcaatagatagatagacagatagatagacagatagacaatagagatggatatgatatatcaaaatatgtttagttgcttataacctaaaaaacaaaacaagcaaaccaacaaaagaccccacacattcagggatcagtggattgatatcattaaaaatgtgcacaggaagaaccattactatatcatttagttcattagttcctcacaaacttaaagaatttattttcacttcctcattttttatttatttattttgctatatcagcttcagtgttaggttttttttttttctttttgaacagaatttcagcagcactatatatcttattcgctcagactataccagaaacagaatatagaattagtcatccatttagatatctaaccacatccccattttgttatttgtgaggggaaaaagattctgtaatctacctaactgccaattccttgtatttaaccagctaacttttgtcccatgccaagcaattgactaatttttaacaacaaaagtcattctgcctctgtttacttaggtaagaagctagtggtatatgggctacaagttggctgtcaaatgtattctgtgggctatacttttcaatcattaagtgtttggcctgaagaaaggggacaatattttgaaagatgtgacaattacactaaaatcaaatgactgtgcccataaacaatctttttaaaaaggcttataatccattccaggtactagggtgtctagtagggtcattgtacacatatttcatagcaaatatatttaacttattttttaaatgtgggtgtgtaggaatcatctacagaagaaggtttccatgagtgtttcaggaggctatattgtgagttacccattaacatgcttcactctgccctactattcctaccttaattcatcactcttattctatttttcttctttctctagtacatccttccattatgtctctactcccttgagagtacccatctatagcatcttaatacttgcctgatacagttaggaattccaaattaaatataaatacctaaagatacaaagctagcatccaaatatgaaagaaacatgcagtatttttccttctggatcatgttaccacatataagataactgttttcagatcaatgcatttaacaatgaatttcataattttacttgtttcattcatattcactgcttgaatgaacatgtagctaggtaagaatatttagatgattttgggtatttgggtgagtgtggtttaactatttcatgtggaatatctatttctatctattttataatcctacatactaattttcatagtagttttaccaatttgaatttccataagcaatgaatgagcatctccttttctccatagccatgccagtatctactaattccgaaaatttctgtctattccattctgaatgggtaagatgaagtctcaaaaggcttgctgcagactggactccatcagtccctcaaccagcaggagaatcagggttctggtactcaggtggataaggagtcagtgggatgacaaacaggcacagacaccagagagagtgctgtatctgaatgtaatttctcaaagcaaacatcagaattatagtacagaagaaaaacaaggaagttaggtgatacatcagtcaaggtacatcgagatgcataatggctctttacacaaaacagagaaaatgcatacataaaagataacaggaaccaggcagtgtttataactgagataaggatcagccctatctaaagtcagctattcacaggagccagatgaaaaggctaattcacccaggtgcaattctagtctgtttttaaacccaccaccaggggtcccttagaaaatacctaattatgctattctactaaacatagacaaagcaacccagtaaggaaagtggtcccaaatgcaggcaacaaactcaaagacagcttctgctcccatttttaggagctatacaaatgtattttgttccaatttctaattggattctttttttctttgttcagttttctgcgtaacttgtatattttttaaattaatttatttttattttacgtgcatttgtgttttacctgcacatatgcccctgtgaaggtgtgaaatcttggagttacagagagttctaagctgcattgtggattttagaaatagaacccaggtccttaggaagaacagtcagtgctcttaagtgcaaagtcatctctctaatgccatcttgtatattctgaagacaaatatcattttagaagtataagttgtaaatattcttctcatgaggtaggctatttcttcactctctcaaatgatgataagctttgctctaaaggaatattttaatttcttgtggtcccatatagtattcagagactccaatggagcataatttaaagaatgcatatatatatatatacattttagactgacttacaggccaacatccatctagtgcaacaatggctttctaccaacagaaagtacaataatccaagaattattcagtccatgagcctggatgtctaagctgctctttggtatgtattagaatactgaagaagatgatttcaatgccaatgaaggaataaacttacccgtaagaagtaaggttagtaggcaaataattatttgttcaatttcttctctttaggctgtcagtagaaggtgtagcctagattaagtatgtattttcccttatcaaaagacacagattagtgatggatcttcccacttcaaataatttaatcaagaaaaatccctcataggtgaatcctaccatttggcttgggtattagttagttccagatgtcaaactgacaaggaagtatagccatgccatctggcaactactggtcttaattattgaactatcaagtttcaattcataaaattcaattataatccctaatttttcctctattagtctcaaggcatagggcttatgttgaggtccttgatccatctggagttcagttttgtgtaggttgagagaaccttcttttagtagacaacaattaacaacctatcacatttgaatgttcagagaataagagactatgaaatgatcagccctaaacaagacatcttcatctaaactacctttttccgatgttcagagatcatcctgaaagaggacaagaaaggtagtaagattgagaaattttaaaaacatggtttcccttgtttaagtttatatttaccatgaaacagtgtttcgctgacacaatagagcagttacaaagatgaactcacagtagttgtaacagcgtggaaaaggccggtataagctcatatcagacaaaatttcagcatggatggaagagatatatgcaagtcttagtcctagctgaggagttatgagcagttgacaactgttgtgataaagaatgttagttttctttaaaagttttccttctgtttgattgactctgctttatggagttgccatatgccagaatatttgggaagcagaatttggataagatgaataaaaaaaaataaattcccaaatttgggtggtatattagtcaggactttctagagaaatagaacttgcagaatgatgagagagtgtgtgtgtgtgtgagaggggggggggagggagagggatggagggtcttagactagtccagctagtctataatggctgtagtcaatgataggtccaagcatccagtagttgttccattcttgaggctgaatatctcagctgttcttcattgtaagacataatacaaaaaatgtaggcacaaatttcagtgaaggaatggacttggtagggagagaaagatctagtatgctaagaaagagagcagcagaagattaaacgtggatcttctcatctcgtaaatatgtattagaagtgtatcttcctgattcaaatgatttaattaaggaaaaaaatccttaacctttgtgcccagccatttgggttttagtaaataacagaaattgttgaagtagcaataatagccatcacaggtaggagtgaaatttagtggaggtagaaaagagggaggtaacacgataaaaatacaagtatgaaattctcaatcaataaaaacataatttaaatcacacaaagaaagttaaatggagatgtcttattgatatacagtctctttctttttcctttcctgtttgtatctctctctctctctctgtgtgtttgtgtgtgtctgtgtgtgtgcttgtgtgtctgtattttgtgtttgtgtgtgtgtgagagtgagagagaaagagagagagagagaaagagagagatagaaagagagagagagagagagagagagagagagagagagagagagagagagagcgatgcagagatgaagaggatgaatttgagattcttattatcaagattcagattgggctaggaggagttctgttgctctttgagaacaacagattctcttattgagaatccttaaagatatatgtgcatagtgggatatttttaattaacctaatacatctatctatgtcctctttttaaattccttctaatgtctatgttcatcctgtatcaataatagaagactgagttttaaggtattttcctcttagccatgattattcatacactagtttattttttttaggatattttcattatttacatttcaaatgttatctcctttcccagttctcccccagaaacttcctatcccattccctcttcctctgcttctatgagggttttctctcacctacccacccactcctgcctccctgccctcacattcctctacactggggcatcatcaagctttcacaggaccaagggcctcttctcacattgatgcccaacatggccgttctctgctacatttgtggctggagccatgtgtccctccatgaccactctttgattggtggtttagtccctgtgagtcttggggggaaggggtctggttggttgttattgttgttcctcctatgggattgcaaacctcttcagctctatcaggcctttttataacttctccacttcagaccccatgctcagtccaatggttggttataagcattcacctctgtatttgtcaggcattggcaaaggctctcagcagacagctatatcaggttcctgtcagcaagcacttcctggtatcagcaatagtgtctgggtttggtgactgtatatggagtggatctccaggtagtccaaactttgaatgtccttttattaatgcatgggatgcctaaggagagaagacaggcgtattgacaaaatcaagatatccttcaggacatagctaaaagtatcatagttttattcaaaaccccacacaagtccatttgtaagtaaatgctgtgaaatggcatagctttaaattgatttactttgatgtgataaaatcatcttataaaagagatggtaaatctgggcttttgatgtaaaataacataatttagattttaaagtagcaaatcttttattgatagtaatttatttgattcaatacaaggtaccaactattatttgctataggttataaattagattgaacaaagaataattcatgaatcatttcttatgactgattcatcagaaacctcattaattgcaataatataataaccttgaaggaaaccagaactagaaactaccactcagccatggtatagagggacaagagaattatgtaatctacacttaacatcagtattcctgaccatactggctaattcttatagtaacactgaccaggagatggttaaacatcaattaaacaatagcaaaatcatgttgttttcttgaaaataaatggatctgatgaacactgcattaagtaaaaaagctagataattatcacatggtatctttaatattttaaatctaaattttgaataaaagagcatgaacataagaaagatgcattaacggaataaaacattttctttagcacttaatttttaagatgtgttacaggtgtgctctatattatttagtataggcactaacttgtaggatgtgacagtcttaggactttggagtgaatagcagtgttacctttcacagaaggtacaaatataaaggtgaaataaggttcccagttttaatggcactgagattcacaaatgtctatgaaatacattcaatattaagaattctctattataagatctactgtagagaacatggggcattatccaagcattagtgctacacacctttaatcccagcactctggagacaaagatcaacagatatttgtgaatacaaggcttggtttacaaagggaattcctagacagccataactacatataaagaccttatcttaaaacaaacaaatgaaacataagaggaaattatggcaaataacagaataaggactttctctaggacttattaacaaactatactgatacagtccctaggattttaaggtatcatggtatgtgagctggaaaaactgaaagaggaacatgccctgagatgccaaccttataaaaagcatgagttggtttatgaatagatgattttacattaaagcttttgatgttcaataatcttaaagaagtgtatattgtcaaaaaaggaagtcatatgtaaaactgttctaaaccacacatattagaagtttacaatgtcaacatcattgaaaattacagtactaaaaatattaacagaatttaaaatacacatttgtaaaggttgtttgaagatttcatatttcttcttttcatcatattaactgtctatttccaaactcttcccaggtctatatcctccttccattctcaactaacttgtgacctctccatcaaggccaatggtgtttactaaatattctaggatgaatgaccttccattaccctgtagtagaattgccaggagctataattgtagagaaaactcactgttcctctccagaagctaacaattgtaaatagttcctgatatagcagggaaacttcatgctcaactcctctctccatgatgggatttggtctggtttgggtttgcacagatcttgtgcattctgtcacagtcaatttccatccatatatgtgatatatgtgtgtgtgtgtgtgtgtgtgtgtgtgtgtgtgtgtgtgtatatatatatatatatatatatatatatatatatatatatatatatgtgtgtgtgtgtgtgtgtgtgtgtgtgtgtgtgtgcactcatacactatctctgcacttacagttttactcccaatgcttgttctacaacgatccctgattccttggaagtgaggtggagtatatatgttccaattttcgactggaaattctgcagtctctgattctcgacaccttgtcctgttgtggatctctgtatcatctactgcaagcatagcttctctgatgaggattgagagatgccttaatctatagatatagtgataagtctttcgtagttggtttgatgttatgtcattttaaccgaataaatggatcagtttttgtttctagggtatatgatctgtctagcatatgtgcttgtgaataatagtgcaaggaattatgggggatggacttaaaactaaacagagagtgattagttatccccatgacattcataccactaacacagaaactgggcacacttttttgaagtttttgaaggttttgtttaaatttacagaaagagataacttacagattgacccagtatatttcttcattcatctctgacaaaatacaccacagcaattttgagagcaacaatttatttttggtacatacaacattaggaatgatcttgtctgtagtgtcgaaagcctcaggatggtgtcttaaatctgtgtggctgatgcatgctccatttactatagcagtgctctacctccaaaggtcccaaaacctcctcaaacagtgaaatcagctgacatgtaacacttgaaagcaaagtcttgtcttcatatagctggggcaatgagagccacccaatctactccccagatttactaaagagtcaggccccgttttaaagggaaagttcttctggagctgttcttggatgtggaggataactggtcaagagaggtctgcaaataaaatgaatttttagtcatgttttctaaaggagaagtcagagttattgtcataatagctagagtccatcaggtcatacatcgggtgagacaataatggatgtgtgtttcagaagtggataattttagtcctttgtgcagactatagtaaaggacttacccataatacttgttactaggtcttcaggtgagcaaggcaaaagggtaatagtggtaaaggtcatgttttcatccagaaatttcaaggtcttggaagcagtagtctctctatgatcagcaaagatctcaaacaccaaactatcaagacaggtacaataattatattagaaagcgccaccttatatatgaaaatatcactagttagatagtgcatattctccacacttgtaacagcattgtcagttatgtttgcaatagacacatgagaggctgtcacatggggcctctctcttctcttagagaatatatatatatatatatatatatatatatatatatatatatatgnnnnnnnnnnnnnnnnnnnnnnnnnnnnnnnnnnnnnnnnnnnnnnnnnnnnnnnnnnnnnnnnnnnnnnnnnnnnnnnnnnnnnnnnnnnnnnnnnnnnnnnnnnnnnnnnnnnnnnnnnnnnnnnnnnnnnnnnnnnnnnnnnnnnnnnnnnnnnnnnnnnnnnnnnnnnnnnnnnnnntttcttttagtctcctgcaacaggggaaagatgctgtgacctagatgtactggctctttacatgcacctcttgtcttagctcatattgatctgttttccaaatacctctttctttcatcaatcagttactacagaacctggaatatggaacattttttaaatgctcccctcatccatcaatttttcatcagtgtaactactctgtgattagggcctggtgtcaatatttttttctcataataattaacatgggttattttacacatctattcccctgatatctcaccatttgaacatatatctccacagggatgtgggtttcattcttcatcttttaatgtccagtacaaatcaagttgtctggctgagacacaacagaaatacaaacaatgataataataacaatatctattatttactcagttttcacaatgtggaatgtagtattttaatttcttaatcttcattaacgaggttgcctaaaaactccttaagaaagtgaaaaaaggacattgaactacagaaagcacatgtaacttccccaatgttgtacttaatataggctaagattgtctacttttaattggaatgcagagaaattcttaccccttcccttctttctttctaaaaggttaatagaaacaagaggttaagaagagaatttgggatgtattacatacaggcatgattcatgatcagccagttcaattagtaaaatattcttagaagttgctgtttggaaataatttaggaaataaattattttaattccccaaatgtataagaatccatagtaataaggacacaaggtaacaatactgttacattatccccccccccccgtaatcaaactttacatttatcaaagaatcttaacaggtgacccctccaccaatcagcaggctacattataatgacttacatatgtgaatctctatgcaagctcatgctcataatacaaccccctgttggtccactctcacagaaagcatgaattaagttgctttttgctcacatcagaggctactctcatgggaagatattttaaacacattgtgaaacatattatgtgctgatccttgttcttcaccagcttgttcataagaatctgatagctccaagttctgtttgtacactttaaccatacgacttcttgcatgtttttttttcttttctcctatgactcttattcttcaaaggggtgaaaacagtgcccatgtcagaggagagattcaaatattggaaaagttacttgacagtggcaggataatacaccatgtgcagttgcatacttgataacaagtttaccatttctcttcatggttaatggctagacgtaaccaacttaaaattcttaataatattcaacaaggcatcagtcaattttcccactagattccagaaattaattaccttttcctgaatatcattgcttatctattctgtagtgcatggtatctgctatatcagatggatttcatggatgtgtcctttcttaataattttgcataggaggttttggttggtgaggtgtagtccctcagtactattttctgtatatttctcatctgagatggatgctaaagcaaaaatgaagtccatcacatacaccttggagcatttggtgactacaaagttggcagttggtaagcaccacaccaggggactcttccatttctctaggactaaacatctgattgtagcaaatagtgaatgactgctactttggactactgacatctttctctctaaatattggcaatgtattggcaacccacagacagctattaaatttgtttaccatgaaggctatcatatgttttgactgttaattttaccaacaatggccttagctcatacataggtaaccaacaatactctaggaagaagtttaaagaagtaatgactattttttgtttctatttttttcagactgtttgaactccagaaggaccaacaccagataaattatgaatgttgaacaagatgaccttacatccacagcagataatgataggtcctaggtttaacagggccctatttgaccccctgcttgtggtgctgttggctcttcaacttcttgtggtggctggtttggttcgtgctcaaacctgcccttcagtgtgctcttgtagcaaccagttcagcaaggtgatttgtgttcggaaaaaccttcgtgaagttccggatggcatctccaccaacacaaggctgctgaacctccatgagaaccaaatccagatcattaaagtgaacagcttcaagcatttgaggcacttagaaatcctccagttgagcaggaaccatattcgaaccattgaaatcggggccttcaatggtctggccaacctcaacaccctggaactctttgacaatcgtcttactaccataccgaatggagcttttgtatatttgtctaaactgaaggagctctggttgaggaacaaccctattgaaagcatcccttcctatgcttttaacagaatcccttctttgcgccgcctggacttaggggaattgaaaaggctttcatacatctcagaaggtgcctttgaaggtctgtccaacttgaggtatttgaaccttgccatgtgcaaccttcgggaaatccctaacctcacaccactcatcaaacttgacgagctagatctttctgggaaccatttgtctgcaatcaggcctggctcttttcaggggttgatgcaccttcaaaaactgtggatgatacagtctcagattcaagtgattgaacggaatgcctttgataaccttcagtcactagtggagataaacttggcacacaacaatctaacattattgcctcatgacctcttcacacccttgcatcatctagagaggatacacctccatcacaacccgtggaactgtaactgtgatatcctgtggctcagctggtggataagagacatggccccctccaacacagcttgctgtgccaggtgtaacactccccccaacctgaaagggaggtacatcggagagctggaccagaattactttacatgctatgctcccgtaattgtggagccccctgcagacctcaatgtcactgaaggcatggcagctgagctgaaatgtcgggcttctacgtccctgacttccgtatcttggattactccaaatggaacagtcatgacccacggggcatacaaagtgcggatagctgtgctcagcgacggtactttaaatttcacaaatgtaactgtgcaagacacaggcatgtacacatgtatggtgagtaattctgttggcaacaccactgcttctgccaccttgaatgttactgcggcaaccactactccgttctcgtacttttcaactgtaacagtagagactatggaaccttctcaggatgaggcacggaccacagataacaatgtgggccccactccagtgatcgattgggagaccaccaatgtaaccacatctcttacgccacagagcacaaggtcgacagaaaaaacattcaccatcccagtaactgacatcaacagcggaatcccaggaattgatgaggtcatgaaaacaactaaaatcattattgggtgttttgtggccatcacactcatggctgccgtgatgctggtcattttctacaagatgaggaaacagcaccatcggcaaaaccaccatgctccaacaagggactgttgaaatcattaacgtggatgatgagatcactggggacacgcccatggaaagccacctgcccatgcctgcgattgagcatgagcacctaaaccactataactcttacaaatctcccttcaaccacacaacaacagtaaacacaataaattcaatacacagttcagtgcatgaaccgttattgatccgaatgaactctaaagacaatgtacaagagactcagatataaaacatttacagttacagaaaacaaacaatcaaaaaacaaaagacagtttattaaaaaaaaatgacacaaatgactgggctaaatctactgtttcaaaaaagtgtctttacaaaaaaaaaacaaaaagaaaagaaatttatttattaaaaattctattgtgatctaaagcagacaaaattatgtgtattcctcagaacctgtttttgctgcacttactattttcccacacctcctccctcccctccccaattgccatatttttcatagatctcaactcccccaaagaactggtctaggaaattttgtaagaattctgttacactttgagatttttatggtgaattctagtggtgagatccagtctattttgtctctttctctctctctctctctctctctctttttttcatttttttctttttccttcatgcccttatgaaatagtcaaatggggaatgcaatattagaaatagatttttaagaaagaacgaggtaaaaatgcaagatcttatatttttcatgtaatgacctgttctgtatttatgaggaggacattctgtggagaaagacaaaaagtaagcaaacaacagattaatttacatatgagcatctataaaacccatgacttttaaaaagcaaacctctagaaccagaatttgtagttcaaaagcttaaaataagattataaataaaatattgttggtttttctgtacc

SEQ ID NO: 78 - DNA, 3474 bp, Mus Musculus
aacccccggaggaggtggcttttgggtgccttgctaaaatgaaggatacgggacgcagctctctcttggagcagaacgcagaggataaggtgatggtgccagagagaagaaagaatgaagctttttcttgtgagacctggatcgtaacataaatgtgtatatggccacacggagagcattggggggaaaaatgaaataagctgatgtcagacctgcggggtttggtgtattctgacataaataatcataaaatagctgtccccctcccccaaggatgtttggaaatgaagaactgaggatccacaaagaaaaagtgtgctcatttttctctgtaaaagagaaagtacgccaaggagatatttttggaatgaaaagtttggggctttttttagaaaagtaaagacctgatatatatatatatatatatatatatatatatatatttcttttggaatttcccacaagaggagaggaaattaataatacatctgcaaagaaatcccactgaagaaaagttgaccgtggaagaaggaagcattgattgggaaagaaatcagcagaggacccttggatcagtgcccgtgttgactaaaattgaaggataattgcagttggattttttttcttcaccaacctccttttttgtgtgttttctttctcgttttcttttggtgtcaagaccgtgcattctttcttgttcttaaccacctggatttccctcgggatgtagctgtgctgaaatacagttggcaaacacgttgcctatttacttcatagagaccccaatggagaacaagactgtttgaactccagaaggaccaacaccagataaattatgaatgttgaacaagatgaccttacatccacagcagataatgataggtcctaggtttaacagggccctatttgaccccctgcttgtggtgctgttggctcttcaacttcttgtggtggctggtttggttcgtgctcaaacctgcccttcagtgtgctcttgtagcaaccagttcagcaaggtgatttgtgttcggaaaaaccttcgtgaagttccggatggcatctccaccaacacaaggctgctgaacctccatgagaaccaaatccagatcattaaagtgaacagcttcaagcatttgaggcacttagaaatcctccagttgagcaggaaccatattcgaaccattgaaatcggggccttcaatggtctggccaacctcaacaccctggaactctttgacaatcgtcttactaccataccgaatggagcttttgtatatttgtctaaactgaaggagctctggttgaggaacaaccctattgaaagcatcccttcctatgcttttaacagaatcccttctttgcgccgcctggacttaggggaattgaaaaggctttcatacatctcagaaggtgcctttgaaggtctgtccaacttgaggtatttgaaccttgccatgtgcaaccttcgggaaatccctaacctcacaccactcatcaaacttgacgagctagatctttctgggaaccatttgtctgcaatcaggcctggctcttttcaggggttgatgcaccttcaaaaactgtggatgatacagtctcagattcaagtgattgaacggaatgcctttgataaccttcagtcactagtggagataaacttggcacacaacaatctaacattattgcctcatgacctcttcacacccttgcatcatctagagaggatacacctccatcacaacccgtggaactgtaactgtgatatcctgtggctcagctggtggataagagacatggccccctccaacacagcttgctgtgccaggtgtaacactccccccaacctgaaagggaggtacatcggagagctggaccagaattactttacatgctatgctcccgtaattgtggagccccctgcagacctcaatgtcactgaaggcatggcagctgagctgaaatgtcgggcttctacgtccctgacttccgtatcttggattactccaaatggaacagtcatgacccacggggcatacaaagtgcggatagctgtgctcagcgacggtactttaaatttcacaaatgtaactgtgcaagacacaggcatgtacacatgtatggtgagtaattctgttggcaacaccactgcttctgccaccttgaatgttactgcggcaaccactactccgttctcgtacttttcaactgtaacagtagagactatggaaccttctcaggatgaggcacggaccacagataacaatgtgggccccactccagtgatcgattgggagaccaccaatgtaaccacatctcttacgccacagagcacaaggtcgacagaaaaaacattcaccatcccagtaactgacatcaacagcggaatcccaggaattgatgaggtcatgaaaacaactaaaatcattattgggtgttttgtggccatcacactcatggctgccgtgatgctggtcattttctacaagatgaggaaacagcaccatcggcaaaaccaccatgctccaacaagggactgttgaaatcattaacgtggatgatgagatcactggggacacgcccatggaaagccacctgcccatgcctgcgattgagcatgagcacctaaaccactataactcttacaaatctcccttcaaccacacaacaacagtaaacacaataaattcaatacacagttcagtgcatgaaccgttattgatccgaatgaactctaaagacaatgtacaagagactcagatataaaacatttacagttacagaaaacaaacaatcaaaaaacaaaagacagtttattaaaaaaaaatgacacaaatgactgggctaaatctactgtttcaaaaaagtgtctttacaaaaaaaaaacaaaaagaaaagaaatttatttattaaaaattctattgtgatctaaagcagacaaaattatgtgtattcctcagaacctgtttttgctgcacttactattttcccacacctcctccctcccctccccaattgccatatttttcatagatctcaactcccccaaagaactggtctaggaaattttgtaagaattctgttacactttgagatttttatggtgaattctagtggtgagatccagtctattttgtctctttctctctctctctctctctctctctttttttcatttttttctttttccttcatgcccttatgaaatagtcaaatggggaatgcaatattagaaatagatttttaagaaagaacgaggtaaaaatgcaagatcttatatttttcatgtaatgacctgttctgtatttatgaggaggacattctgtggagaaagacaaaaagtaagcaaacaacagattaatttacatatgagcatctataaaacccatgacttttaaaaagcaaacctctagaaccagaatttgtagttcaaaagcttaaaataagattataaataaaatattgttggtttttctg

SEQ ID NO: 79 - protein, 566 aa, Mus Musculus
MLNKMTLHPQQIMIGPRFNRALFDPLLVVLLALQLLVVAGLVRAQTCPSVCSCSNQFSKVICVRKNLREVPDGISTNTRLLNLHENQIQIIKVNSFKHLRHLEILQLSRNHIRTIEIGAFNGLANLNTLELFDNRLTTIPNGAFVYLSKLKELWLRNNPIESIPSYAFNRIPSLRRLDLGELKRLSYISEGAFEGLSNLRYLNLAMCNLREIPNLTPLIKLDELDLSGNHLSAIRPGSFQGLMHLQKLWMIQSQIQVIERNAFDNLQSLVEINLAHNNLTLLPHDLFTPLHHLERIHLHHNPWNCNCDILWLSWWIRDMAPSNTACCARCNTPPNLKGRYIGELDQNYFTCYAPVIVEPPADLNVTEGMAAELKCRASTSLTSVSWITPNGTVMTHGAYKVRIAVLSDGTLNFTNVTVQDTGMYTCMVSNSVGNTTASATLNVTAATTTPFSYFSTVTVETMEPSQDEARTTDNNVGPTPVIDWETTNVTTSLTPQSTRSTEKTFTIPVTDINSGIPGIDEVMKTTKIIIGCFVAITLMAAVMLVIFYKMRKQHHRQNHHAPTRDC

SEQ ID NO: 80 - DNA, 4115 bp, Mus Musculus
cagacacctctgctgattgactcactcctggcttgatacatctgccttggggacacgaatccggaatctagtttccatcccccagccccctgattttggatgttcttttgattctccacagacctgggaaggtaaccgcaagccataccatctgcagctcacagcacctcttggaggttactactgacagttttcattacacaggcttctgtgagtgcttatgtgtttgtatgtgttcctgcgtgtgggtgcctgcttcctcgtaaaagagattgtgtgagtgtccgtactgtgtgtggggatttgtgagacaagcaaaggaggtataccgtacaagaggagatctaaacagcgtgataaaaatctccaggcactggggctcacaatctctagccccccctcctcacaccgccccttctttgccctactcccccggctcctttcgtctttgatgagtttttggctcactttttggcggagtctcttggacatgttctgctgttgctgaaggatcaaataaatggaacctttgaaagttgattatttttctcttatgtgacaaacacacacagagagagcgcgaagaggaaggaaattagagtgctgtatgacaagctagaggatttaaatttttccttggtgaactttgaggatccgctgagaagaaaccaaatgaagtgtttaccgtcattatctctatttgatgaagaggatactggggctcaaagagacttaataacttgtccaagatcacctaatgctgaataatcaagaatgagtgccatgaaagaacaaagaccagcctggaccagcatatttttgagaggataagccacagggtagcagaaatgattcacttgatggcatgcctgtttgtttacccagagagagtggagctgaggaagttggagcttccattgacactctaaactcatgaattaccgaaggaacgaagaataatgcatgtattttgacacaatggagacatcctgacacctcttctgaatctcagtaaattaactggattcaagcttggcaaacaggaaaactggtacaagacaacttgctacagctcaccactcaccagaggcagtgaaaaagaaaacttaacagggtaaaggatgtggacctgtttagacaaatcagcagccatagctcaatccactagcaaacaccattcatgaatcagcaactgcagtttgatccagaagaaacctccaggctctgactattggcctgagtccagagaattggcaagatgctgcaggaatatcacacaagtactttggtgtgaagaaacatcaccagtagagatccaggacacgtgttttacttctttgaattctctcaggaagagaagagccagaaagacccacattaaggttggcaaacacgttgcctatttacttcatagagaccccaatggagaacaagactgtttgaactccagaaggaccaacaccagataaattatgaatgttgaacaagatgaccttacatccacagcagataatgataggtcctaggtttaacagggccctatttgaccccctgcttgtggtgctgttggctcttcaacttcttgtggtggctggtttggttcgtgctcaaacctgcccttcagtgtgctcttgtagcaaccagttcagcaaggtgatttgtgttcggaaaaaccttcgtgaagttccggatggcatctccaccaacacaaggctgctgaacctccatgagaaccaaatccagatcattaaagtgaacagcttcaagcatttgaggcacttagaaatcctccagttgagcaggaaccatattcgaaccattgaaatcggggccttcaatggtctggccaacctcaacaccctggaactctttgacaatcgtcttactaccataccgaatggagcttttgtatatttgtctaaactgaaggagctctggttgaggaacaaccctattgaaagcatcccttcctatgcttttaacagaatcccttctttgcgccgcctggacttaggggaattgaaaaggctttcatacatctcagaaggtgcctttgaaggtctgtccaacttgaggtatttgaaccttgccatgtgcaaccttcgggaaatccctaacctcacaccactcatcaaacttgacgagctagatctttctgggaaccatttgtctgcaatcaggcctggctcttttcaggggttgatgcaccttcaaaaactgtggatgatacagtctcagattcaagtgattgaacggaatgcctttgataaccttcagtcactagtggagataaacttggcacacaacaatctaacattattgcctcatgacctcttcacacccttgcatcatctagagaggatacacctccatcacaacccgtggaactgtaactgtgatatcctgtggctcagctggtggataagagacatggccccctccaacacagcttgctgtgccaggtgtaacactccccccaacctgaaagggaggtacatcggagagctggaccagaattactttacatgctatgctcccgtaattgtggagccccctgcagacctcaatgtcactgaaggcatggcagctgagctgaaatgtcgggcttctacgtccctgacttccgtatcttggattactccaaatggaacagtcatgacccacggggcatacaaagtgcggatagctgtgctcagcgacggtactttaaatttcacaaatgtaactgtgcaagacacaggcatgtacacatgtatggtgagtaattctgttggcaacaccactgcttctgccaccttgaatgttactgcggcaaccactactccgttctcgtacttttcaactgtaacagtagagactatggaaccttctcaggatgaggcacggaccacagataacaatgtgggccccactccagtgatcgattgggagaccaccaatgtaaccacatctcttacgccacagagcacaaggtcgacagaaaaaacattcaccatcccagtaactgacatcaacagcggaatcccaggaattgatgaggtcatgaaaacaactaaaatcattattgggtgttttgtggccatcacactcatggctgccgtgatgctggtcattttctacaagatgaggaaacagcaccatcggcaaaaccaccatgctccaacaagggactgttgaaatcattaacgtggatgatgagatcactggggacacgcccatggaaagccacctgcccatgcctgcgattgagcatgagcacctaaaccactataactcttacaaatctcccttcaaccacacaacaacagtaaacacaataaattcaatacacagttcagtgcatgaaccgttattgatccgaatgaactctaaagacaatgtacaagagactcagatataaaacatttacagttacagaaaacaaacaatcaaaaaacaaaagacagtttattaaaaaaaaatgacacaaatgactgggctaaatctactgtttcaaaaaagtgtctttacaaaaaaaaaacaaaaagaaaagaaatttatttattaaaaattctattgtgatctaaagcagacaaaattatgtgtattcctcagaacctgtttttgctgcacttactattttcccacacctcctccctcccctccccaattgccatatttttcatagatctcaactcccccaaagaactggtctaggaaattttgtaagaattctgttacactttgagatttttatggtgaattctagtggtgagatccagtctattttgtctctttctctctctctctctctctctctctttttttcatttttttctttttccttcatgcccttatgaaatagtcaaatggggaatgcaatattagaaatagatttttaagaaagaacgaggtaaaaatgcaagatcttatatttttcatgtaatgacctgttctgtatttatgaggaggacattctgtggagaaagacaaaaagtaagcaaacaacagattaatttacatatgagcatctataaaacccatgacttttaaaaagcaaacctctagaaccagaatttgtagttcaaaagcttaaaataagattataaataaaatattgttggtttttctgtacc

SEQ ID NO: 81 - protein, 566 aa, Mus Musculus; identical to SEQ ID NO: 79

SEQ ID NO: 82 - DNA, 2105 bp, Homo Sapiens
caccagataaattatgaatgttgaacaagatgaccttacatccacagcagataatgataggtcctaggtttaacagggccctatttgaccccctgcttgtggtgctgctggctcttcaacttcttgtggtggctggtctggtgcgggctcagacctgcccttctgtgtgctcctgcagcaaccagttcagcaaggtgatttgtgttcggaaaaacctgcgtgaggttccggatggcatctccaccaacacacggctgctgaacctccatgagaaccaaatccagatcatcaaagtgaacagcttcaagcacttgagacacttggaaatcctacagttgagtaggaaccatatcagaaccattgaaattggggctttcaatggtctggcgaacctcaacactctggaactctttgacaatcgtcttactaccatcccgaatggagcttttgtatacttgtctaaactgaaggagctctggttgcgaaacaaccccattgaaagcatcccttcttatgcttttaacagaattccttctttgcgccgactagacttaggggaattgaaaagactttcatacatctcagaaggtgcctttgaaggtctgtccaacttgaggtatttgaaccttgccatgtgcaaccttcgggaaatccctaacctcacaccgctcataaaactagatgagctggatctttctgggaatcatttatctgccatcaggcctggctctttccagggtttgatgcaccttcaaaaactgtggatgatacagtcccagattcaagtgattgaacggaatgcctttgacaaccttcagtcactagtggagatcaacctggcacacaataatctaacattactgcctcatgacctcttcactcccttgcatcatctagagcggatacatttacatcacaacccttggaactgtaactgtgacatactgtggctcagctggtggataaaagacatggccccctcgaacacagcttgttgtgcccggtgtaacactcctcccaatctaaaggggaggtacattggagagctcgaccagaattacttcacatgctatgctccggtgattgtggagccccctgcagacctcaatgtcactgaaggcatggcagctgagctgaaatgtcgggcctccacatccctgacatctgtatcttggattactccaaatggaacagtcatgacacatggggcgtacaaagtgcggatagctgtgctcagtgatggtacgttaaatttcacaaatgtaactgtgcaagatacaggcatgtacacatgtatggtgagtaattccgttgggaatactactgcttcagccaccctgaatgttactgcagcaaccactactcctttctcttacttttcaaccgtcacagtagagactatggaaccgtctcaggatgaggcacggaccacagataacaatgtgggtcccactccagtggtcgactgggagaccaccaatgtgaccacctctctcacaccacagagcacaaggtcgacagagaaaaccttcaccatcccagtgactgatataaacagtgggatcccaggaattgatgaggtcatgaagactaccaaaatcatcattgggtgttttgtggccatcacactcatggctgcagtgatgctggtcattttctacaagatgaggaagcagcaccatcggcaaaaccatcacgccccaacaaggactgttgaaattattaatgtggatgatgagattacgggagacacacccatggaaagccacctgcccatgcctgctatcgagcatgagcacctaaatcactataactcatacaaatctcccttcaaccacacaacaacagttaacacaataaattcaatacacagttcagtgcatgaaccgttattgatccgaatgaactctaaagacaatgtacaagagactcaaatctaaaacatttacagagttacaaaaaacaaacaatcaaaaaaaaagacagtttattaaaaatgacacaaatgactgggctaaatctactgtttcaaaaaagtgtctttacaaaaaaacaaaaaagaaaagaaatttatttattaaaaattctattgtgatctaaagcag

SEQ ID NO: 83 - DNA, 2105 bp, Homo Sapiens; identical to SEQ ID NO: 82

SEQ ID NO: 84 - protein, 640 aa, Homo Sapiens
MLNKMTLHPQQIMIGPRFNRALFDPLLVVLLALQLLVVAGLVRAQTCPSVCSCSNQFSKVICVRKNLREVPDGISTNTRLLNLHENQIQIIKVNSFKHLRHLEILQLSRNHIRTIEIGAFNGLANLNTLELFDNRLTTIPNGAFVYLSKLKELWLRNNPIESIPSYAFNRIPSLRRLDLGELKRLSYISEGAFEGLSNLRYLNLAMCNLREIPNLTPLIKLDELDLSGNHLSAIRPGSFQGLMHLQKLWMIQSQIQVIERNAFDNLQSLVEINLAHNNLTLLPHDLFTPLHHLERIHLHHNPWNCNCDILWLSWWIKDMAPSNTACCARCNTPPNLKGRYIGELDQNYFTCYAPVIVEPPADLNVTEGMAAELKCRASTSLTSVSWITPNGTVMTHGAYKVRIAVLSDGTLNFTNVTVQDTGMYTCMVSNSVGNTTASATLNVTAATTTPFSYFSTVTVETMEPSQDEARTTDNNVGPTPVVDWETTNVTTSLTPQSTRSTEKTFTIPVTDINSGIPGIDEVMKTTKIIIGCFVAITLMAAVMLVIFYKMRKQHHRQNHHAPTRTVEIINVDDEITGDTPMESHLPMPAIEHEHLNHYNSYKSPFNHTTTVNTINSIHSSVHEPLLIRMNSKDNVQETQI

SEQ ID NO: 85 - DNA, 40535 bp, Mus Musculus
  misc_feature (2508)..(3336): n is a, c, g, or t
  misc_feature (17090)..(17109): n is a, c, g, or t
aaaccacagccaacttccgaagcggtctcattgcccagcagcccccagccagtgacaggttccattcaccctcgttgcccttctccccacgacccttttccagaggcgactagatccctccgtttcatcccgcacgccatggacaagttttggtggcacacagcttggggactttgcctcttgcagttgagcctggcacatcagcagatcggtgagtggcccgccaccgcgcctgaggactccagctggatgcctctgggttgaatcgccctggggagggactgtagtgaattgggctagcaaagcaaagctgggatttggggctatgctattggaaagagtttacgcctgggaagtgctgctttggtgaaaggaaaagagaaagggagaagaaagtttgctgggcaagttgcccgcagattttgggcgaggtccccatgcttgctggagcacatggctcaaaagtaactgtactcttggatgcccgcagcctctgtcccgactaacaggctctggtgctcaagggctccccaagcctggctaactgtggctaggcaggtagaggcagacactggaacagacctgtagagcactccccaaggtgtgcacatagctacaggccagagattgggcaatgagcttttcagaaaggagcctcgaaaagctgaagacagtgggtcccagctttgactagttttcgggggctcttaaagtcagctttggtcaccaacggctttattttagcttgtgggagtttgaactggtttgtgtgaggctctgagtggcctaaaggttccaacatggaccaaggaggacacataaccggagcaataattcgaccagccgcgcagtgcttgcagtctaggcaaagtcaaacagcaacagggttcatatttgctgcctggcagcctcagagcaggaggggacctgtatcagggtaacctgtgaactttagcgcagtccctaatatcccatctaaatgtggttggtgactttggtggctgtggagaggaggagcttgggccaaatatccagtatggctcattttcaagcgtcccccctcctttatctatatatgaacagataattccacgaaggctttggttatcatcagcatagttaaattttctttgaagaagtgccagctaggtcattaagtcagctcagacttcagtgagttcctctcaacaagaattactaaatccagttctgggggtaaggggtgccaaactgggtttttttttctttttagacatggtacgttgggattagaaaatcgcacctccattgttgaatgttaaattttgaatgctgatgcagaagtaatgcaaataataattgcagtaggacactattggccatttgtgtgtgtgttctttgctgtgctatgttaggtaattcacataagctatctcattttatcctcatggtgatttggtgacaaatgctccccccaacaccttaccagtagggaaacagaggctcagagaggttaggtgacttcccctagtcacacagcaaggagtggggctgggtgtgaacttgggttcattaagttccctagcttagactgccatgggatatctaaaagcaagtgctagacaaagttgaaaagaccttcagggacagtaacagtctagccagcagaggctgcagtggaggctcccatagggagccagagctcctaggatccattggaaggcagaaacattcaggatggatgagggaaggacagagagagcctggacctgacctcagaggacaggaggaaggttggcacactgctcccacctttgttggggctgaggagccgaactcccacattttcctggcctgtctcccggctattctaaaaggtctactcccagatacctgttgcccttccaaccccccctggagtcaggttctgaggccagcaggctctcttctgccttggggtttctaccttcttgttgtacagtgtggctccaggacaagtagagctggtgccagtagcagcagctccatggaccctggcttttacgcccttgtaaagcagatgaaggaactgagactctgaaatgagatgtgacttagcacaggatgtgtgtgaaagagaaaggggagggagaagagaggcatcatggttgccccattctgggagtgactggtttgggaagatgatgaggaagcactgagaccagcaaagttgctggtggtggggctgagggtggggagggtggggaatggaggtggaggggcgttggggaggggtggcgtaagaggaggaagcatccatcactgtgctggcagtcaaacggtagagaagtggtggaggcctaaagcaacttctcccccaagggaagaaagtggccctagaccaaaggcagaggggacaagtgtccacttgcatctctcctctccctttccaaagatcgtggttaggaaactgtacctctattgttgaggaagatggggttcattctgggagttcttgggacttggggacagcaggcaccgttctgcttnnnnnnnnnnnnnnnnnnnnnnnnnnnnnnnnnnnnnnnnnnnnnnnnnnnnnnnnnnnnnnnnnnnnnnnnnnnnnnnnnnnnnnnnnnnnnnnnnnnnnnnnnnnnnnnnnnnnnnnnnnnnnnnnnnnnnnnnnnnnnnnnnnnnnnnnnnnnnnnnnnnnnnnnnnnnnnnnnnnnnnnnnnnnnnnnnnnnnnnnnnnnnnnnnnnnnnnnnnnnnnnnnnnnnnnnnnnnnnnnnnnnnnnnnnnnnnnnnnnnnnnnnnnnnnnnnnnnnnnnnnnnnnnnnnnnnnnnnnnnnnnnnnnnnnnnnnnnnnnnnnnnnnnnnnnnnnnnnnnnnnnnnnnnnnnnnnnnnnnnnnnnnnnnnnnnnnnnnnnnnnnnnnnnnnnnnnnnnnnnnnnnnnnnnnnnnnnnnnnnnnnnnnnnnnnnnnnnnnnnnnnnnnnnnnnnnnnnnnnnnnnnnnnnnnnnnnnnnnnnnnnnnnnnnnnnnnnnnnnnnnnnnnnnnnnnnnnnnnnnnnnnnnnnnnnnnnnnnnnnnnnnnnnnnnnnnnnnnnnnnnnnnnnnnnnnnnnnnnnnnnnnnnnnnnnnnnnnnnnnnnnnnnnnnnnnnnnnnnnnnnnnnnnnnnnnnnnnnnnnnnnnnnnnnnnnnnnnnnnnnnnnnnnnnnnnnnnnnnnnnnnnnnnnnnnnnnnnnnnnnnnnnnnnnnnnnnnnnnnnnnnnnnnnnnnnnnnnnnnnnnnnnnnnnnnnnnnnnnnnnnnnnnnnnnnnnnnnnnnnnnnnnnnnnnnnnnnnnnnnnnnnnnnnnnnnnnnnnnnnnnnnnnnnnagggattggtgagttgcctgttccgttagggtgtgaggacatctttgaaatactgaagtctctggagtactgtgggagccccagtgtttcacctgaagtggtgaggaggaaggtgcggtcaatctggggtgtggcataacatttttaaaaaatatttttattaggtattttcctcatttacatttccaatgctatcccaaaagttccccataccctcccccctccaactcccctccccacccactcccactctttggccctggcgttcccctgtactggggcatataaaatttgcaagtccaatgggcctctctttccagtgatggccgactaggccatcttttgatacatatgcagctagagtcaagagctccagagtactggttagttcataatgttgttccacctatagggttgcagatccctttagctccttgggtactttctctagctcctccattgggagccctgcgatccatccaatagctgactgtgagcatcaacttctgtgaaaaatatggaacgcttcacgaatttgcgtgtcatccttgcgcagtggccatgctaatcttctctgtatctttccaattttagtatatgtgttgccgaagcgagcacgtggtataacatttttaacactttcagtgctacctacacactcatcacagttttgtattttatggctcaatatattcagtttgagtttaagaattatgatcaccatatcttaccctaaagaaaaatggtacccaagacaaacctttcttgtttcatatgactcttgagcattactgaaaaattagaagtaccctatttttcatttatttatctatttgtttatttatattcattcattaatttattcactttatatcccgattgcagcatcctttctcctcccagtctcccctcacatacttcctcccccataccccttcctccttctctgagaaggggaaggtccccctgggtacgaactcaccctagcacatcaagttactgcagtactaggtacatcctttcccactgaggccagataaggctgcccagttaggggaatgggatccacaggcagacagcagattcagggattgcccctgctccagttgttttgggacacacatgcaagctacacatctgctacatatgtggaaatccagcccatattttctggttggtggttcagtctctgggagcctccaggggtacaggttagctgactctgttggtctttttttggagtccctatcccagaaggaccataattttaaaatcctagcatattgctaatgccacccagtatccaaaacccgtaagaagtgccactcactgctcaaattcagtcaacagtagttgtttgttttttgttgcatggctttgcagtggtctcacacattgagattctcctagcaccgttttctcgataatgaaatcaaggatccaaggacacaggagtagagttgaggtgccccatcatctaccatcaccccatcactacctttggaggattctggaagtagccggtggtctctcactgttcctgcctgctgtactcagcagagtgatcacgaatagcctctctctcttgcctccctccagaaggctgtaggctcctggctgccctgccttgccctcctctgtcccatctttcccaggactcagccacagctgttagagatgccaacctagatatttattgctaaaataagtccatttccttatcagagtccagctgcccttttagacatgctctcatttctaggcttggcaaaaagggagaggctgctccttacctaagagacaagtcagggcaataccccttgcctgcaaattaagaaaggtcccacagacactcctgtgctgctctcggaggcattttggatgcagtgacccatagagaactgctgttatatactctttagatggttaaatatactcaccccatttgaggggaagtcttgaaatcccaggcagtgggttgacagggctttctagagaagttacagctcttgaaccaaaatccactgagaacctctagaagcaagtggctacccaaccagatagactcagttccactaaaaaaacaggaggcatgtgtgtgtggcagggctgggggatggcttccccaacagcctgccctggggttgcttgccgacaaggtatgagttacattagtgtttcatgaggacctccatttgagcaactctaaccagagcgtacgtgggaaatgactcttgtgaaagtgtgagctgaagcaggtggcagctgtgtcttggccccgcagagtttttaaagggactcttctctccttcagagagcgattcttggggtttgtaccagaagctgatgactcggtttactttgtgcctctgcttgaacgaggacacaagcggttttttgaggagggccttacatttgagcccagattttcattcacttagtggtctcacatttttgttaaacatatacttcactgaaactcagtgacagagtgtttacctagcatgcatgaagtcctggcttcaacctccgtcactggggaaacaaacaagtaaaccaaaacctaaaagcaaacaaccacaagaagaacaaaaaccaaaatcaaaccaaacaaaaccaaaaagcccatcctagctccaaactggccagtaaggatttggggagccaggaccgatagtgagaaatggaaaagatgtttctgctacctgccttctgcagcctcgtgggatatcctgagggattccatctaatcaaggattagatctcactcacttttatggtcccagatcccagtgcagatccacaatgacgaccagaaatgttggactgaaaagagtgtctgaaatagagaaataagaattttcatgtataaaggcaggctagctgacacactaagtgtgcaaatatgcttgtgtatgacagcacgctgagagtgttgacattctccacagtgtgtggagaaggtttggctggccaactgcttatacaggggcttctatgtcctcttcccaagcagagaggttgtctctctgtgcttttggtggctgctggctacggggtgggtctaaggagagggttagtggatggctgggaatgggttgatgacaccaaactcacacttaaacctcaaaatgaatcactgtccagcagcagtttgctctgagagctgctggtctgacactaggagtccttgaatcagagactcacagaccctctgaatcacacttggttctggcaggtggaatcagcagggagtgatgcaggaacacttcccagaacactcttatatcttctatggctcactatcaaaatgacactactgtatcccactagtgcctaatctgcaggaagcctggcagctaacagggcacccagtggcttcctctgcaatgagcttgcccagcacgaagttgctcaagcctggagtaggtcctgcattccttagaatcgcttgtctaccagtgctcagagactgccaaacacaggatttggggatactgttatgggggctagactcacagagccagaactccatgaggttggggtgccccagctgcctgggtgtgcccgcctggtgcaagtgtccctcctttgtgcaagtgtgggcagacagactcacagtgggtggggagggcttgagtcaccaaggatatgatttgcaaaactcaggtcccaagaaccttcctcaagtcttcagcttttgaaagtaaaggttaattgcaaaacgccagggtggaaggaaaaggtcatatgagcagtgattctgagcatctgtaccttcagcaatggctggaagttaaggcactttgagagctcttacaccgtttgtatttgctttttagtaccgaactgtaggtttctgagctaccattaccaatgttaataatcataacaaacagaacagaccctctccttgttttctataaactaacttgtccaaactatgcaccaatcttataaaaacagtgcttttaataccctctttccacatatgagggaaccaaggcacagaatttaaggaaatgggccagggccacatagttgcaaaatgaggggactgagatttaaaaccaggtcctcatgtgagtgcaggtcctgaaagggtccagaagtacgtgttggataccctggatctggggttacaggcaactgtgagccacctcgtatggtgctgggaactgaactctgagcctctgcaagaacagcaagcactcttagccactaagctatctatctctctagctccttgcctttcattttaaaacctggcatcagaggagagtacagaacttgcaaataaaaagggcaaagatcatgtcctcgaagctgctcttttatcacatgatcaggagtctagctcctactttgtggtgaggtttgggagttaagttaatggggggtgatatgtgtttttgttcatggttgcttcattttttatttctctccttggtaaaggtggactttaatgactgatgtttttctgtcatctaagactgtgacttgtaattaaagaaagcagaaggaggcatgggacaaataaacagtaaccaagtacttccgatttgttgacaaacccctgaatccagggtcttcatgctataaacaggaattgatgggaagaaagggaaactgagacaggagttggcttttacatccagggcaaagaggacttggtccggggtagctcttcttctcagctctatggcaaaccaggtgacctggaattggcttggtgtacagcagacaaatgtcacttgggcaataagatccttttctttgggcatccctggctgagaaacaagttattcaggaagagaggaggtgaagcacttgggcacatgtgactcagtctgtaaaagggctgcagacctttagtctggaggcaggaactcattcaggatttcccatctgattcaatgtcatgcatatctttactattaagtgagtctgcagtgccttccaaaagtatcacgcaccaaccatgaatgaggcagcactgtttcttatttcatttttttaaaggatactagtgaaacctctttgcaaggattcaccaccattggaactaagacgcgagggagaaaagagtgggtgcacacacctggcccttgcctttgcccttgacagtcatttcactataatcctgaccccgtctctgcaggttccagaagcaccaaataagtatgtcaggcacaaacgctgccagtgatgactgtaccctgcctaaaaagccgagtctaacagagatgagttccaacttgaagcctcaagagaactacttgcttcttttctgtagctaccagagagctgtaggggctccacactggcaaagggaggacatggactgagggaagcccaaagagcagaggccatgcatgcatgggtgaggtttggagaggaaatcctctggcagcttgtcttgtgttggatcctctgtttttcatgataccttagaggttatgttcacttagagattacgttcacttatttattcctaaatccaattcctctcctctactgttcactagttagttgttcatgctattgttgcattgcctgaccattcgtgagaacttcacttagggtgatgcctcagttggtaaagtgcttgccttgaaacacgaggctctaaatttgctcctcagcacccatgtaaaaacccaggaatgacagtgtgcacttgtaagtcccaactccagggaggtggagataggaagactgtgcagccagccaagctatttgacaagttctaggccaatgaaagatcctgcctcccccagtggaaaacccatgcattatgaacatttttgcatacaccatagctccagctactggcacatttccctaactatagtaagctctcattaaatatttagatggttaaccgaattaaatttctggacttaatcttagaagaaatcaccatcagtaactattcgagatattttgggtaagttctggttgtcttgtctttctttttggtctctagaaaacattttcttccctcgtgctccttgaagcaaatctcaaactccttgaagtttctttttctgggcaccctcttcagcttaagtggatctttgttaaggtttgacaggtcaggcaaggcaaggaggtgaaaaagcccattagattttgtccaatagagtaggcctcttgatttcctttaggtctggctatgtgtatgactcagttatcttaaaagctgaccttgaatatagtgacacccccccccccgccatcatcaaaatcctgttctcagcaacattctgagacacagtgttggctttttggtccctatgtttaaaaatgtgtgatgaggtggagagagggagtgtcatttcgtcccatcagtggtttgcagatctaggagctgctccatgtaaaaagacagttggtgcaggggggagggggagcttaggggagggtggtgctgaagactccatggttgtaaaacatgaaagattctagtttactctctctgtcacccatgagcagggtgagctcagacatttatgctagaccaagattcagctcaagctttctaaagttccgcagcatacagaagtgctctcagtatagaaatgatcctctgttttgtttctctctgtcactaattcactatacagttcctccccacaccactgtcctctattttctccctgtgtaaaaggagagagcaagaccctaggtgatctctatggtcctgtccaggcctcctgttctataaattcaccactctgagttcactaataaccatgcttcataaaacttagtggagaaaataacactactataatatcgtaatagaacagtaccaaaaatgtgatgttcagtgtggatttaatgtcatcagtgagctattaatgccagaaacaagcacaaagacccagttatactccataaacagcagcaggcaaaagtgatttctagggacaaggactttccctcctcgtacactatcaaattctccctccttcttggaaggggataggtgtaccccagtcctgacagagaagctaacaatgtgtctcagccacacagcttccactgcagggagctaggcctggaatcatgggctgaatccaaatgaaacactgcttgtttcaatgataattcaaacagtattgtcccaggaggtctgaaaatacagcttttgtgagaagaaactatgtctttcattcttaaagtttcatgagcatactggatttctcaacctccttcaaggagcctttacagcgtgttactacaaaatgatccatgtattcaaccaaaccacccactataatatatgtacaccttggctgcagcaacggctcactggttaagagcactggctgctcttccagaggactcaggttctatgcccagcacttgtatgctagcttacaagtgtctgtagtttcacttctgaaggacctgacactcttttctggcctctgagcataccaaactcaggcatgggccatggacattcaggcaaagcactcatgcacataaaaaatgataataatacatatgcacatatgatatatattatgcatgaatataaaacatgttatatacatataaaactttagtagggtactgtactaaaggccagtgagatgagtttactccttctaccaagagacttctagatccttgttaaattttctcctataaatccagagaaattctttctcagtgggagaaaaaaagaaatcataaatgctgtgatactcaggaggttttgaaagggggggtcaggggctgaataccctgtctacttccagccctcagtcagtgactgaaggtcttcggtcaggttgtaatcctttctgcttgtccccacgtcatagtcacctggaatccaccaacctttgatggaaataaaattccagatagtttcacctattgtgtcgtaattgtgcccttagttgttgagtatggttctgctgtctgtatttccaaccagttatacagacatcgtgttactctgagaaaagtgagagcccccacagtgccagcaaacagccctttgtcttggtcacagattggctgtggacatggtccctcttttatcattgctcctgtttcctcagatataaattggtgacaagctgaccagtttattatactgaattgtgtgattgacaggtggaaggaagtgagggatgcctgtgagctattctcgggtatgtgataggttggtagctagaagctactaacttagtagaagtcaccaagcttctaagtagaagctatcaagctaccacgtagaagacagggtgtaactgagtggagatgagaaaaagcagaacatgctcctgagctgctggtatgtaggaagatctctaacttctaatctagttagacgattatactgacctgagctgctggtatgtaggaagatctctaacttctaatctagttagacgattatactgagtgaggggaaaaaaaagaacacaggagaaggggaacaaagagggtacgtcatgagcaaaatgtttaaaggagtggataaaagtatgacatcattgaacttaaaggttatctacataagacagttcatgttgaagagatggttgcaacagattccaggtgacagaataaaaatgacattgtctatagggtccaattctccctcagaggctcagaggaagcccccaatcctgtcaggtagtgctaacagaatctggaacaatgtgagcgccaatgcggcggtgagaactttaaaacttttaccttgtttggagagtgacaattcaggtgactcccaaacaagtcctgtgacatcctgctcctgtggcatttattgctgatcaacagaggctttttggggtgctgtgttaaaaagcttaatcttatgcaaagactgctgtgatccattcgtgatgtctgccatggacaaaatatttttgagcatttggctccctcctgtcacaccaatgacaccataccggagcaccaaacttctctatgttatgtttctgaaagtcatctgtagaatcctctggaagtttagccatccttgcatctagataaggagccatcctctccaccccacccggcatccagcacagtataaaaatagtcttttacccagaggacaggttcagtcacgcgtgcctcctcttctgattcatgcttgttctgttttcccatcaccccatgtcaagttagtttcttggagccaggaatctcctgtttgaaccaaggccagacatactggtaaagggacccttcttctcatcgcttcatctgcaaactgagaagacaaaaaaaaaagaaaagaaaagaaaaagaaaaagaagaagaagaagaagaagaagaagaagaagaagaagaagaagaagaagaagaagaagaagaagaagaagaagggaagcctcacccacgagggtgataggagaaagaactagctaatgggaagaaagcctttgaagatgaaagggttgtacttgcatgttaattacaagttttatcagcccctagagcctttgcattctcagctgccactgggctctcttctaggcttctcaaatgtaaaacagcaacaacattccacagactggctcggctcagagcatccaagtccagaaagctgaattctaagctcaagctagccaggcactctgaaccactcaaatttccctacttgtccccaagggaaaaagtaggctcactacctaggaaggcaagataagatagagctgaagtataaacaaaaggctccatggagagtctactagaaatagcccctgggtaagattaggacattctgctctaattcccaaccagtgaaagcctaattgtgtgaccttgggctattggctttatctatctaatgcttcgatatactgtgtgaaccacctaggataataatccctctgcctcctcttgacctctgcaccttggcttgctggtgtgaaagtgagtttgttttgtcaccccccaccccttccctggtcaggctgaagcacatgaataaaactacaaggtgctattattacctgagctaactttcacctttatctgtgtctcctattgctggttgaccccaatcattgaaaccatattctttggaatgctcaccaatcttctcagagcttccaaaccccttcttatctaggagggcttcatattggcccaggcttctttttggttgtgccatttcctgaagcgtgtgaatatgttcgggctgacaggggactgaggtgttctgcacaggtgggtctcgatacttttggtgggatagctcaaccacaacactggagacaggtaggaaggctatctagtgctgaaagcttgaaacatgcaagctgaactggatacccacagcagcaccataatatggctcataaaatggagaaatgaagaaagaaaagaaagagcctaagagagaagttacaatggccttggcactacaatccaaagaggctaccaagtcagaaagaagacttggaaagtatatagcacacttgtccttattggacatcctattgaaacttcaaggcttcaagtgactgcccaaggtcacacaacttactggctatatacccaggttttctgactcctagacaagcctttttccattttccttctttgaaatagtagaggataaatcactaagcactgaattaccactctaagaaggccttgaatataaaaagggatggaactaaaggagcagtgcattagtggcacaatgcagaatgtataggtaattacattctttaagggccattgctgcactagagctgttcattttcttgcatgtcttatttggtgttctttggatcatttttgccttatggggcaaccggaacaaaaggtccagagcaacctagactggcctttgggattctgagtggcgtcaatggtcatgtgcttcatggattgagtcaacaagatgtgtacatgataaatcgtgtctgctagacactgatgatgtaacttgcgatgtgaagcacagtctcattggtgcttcctggcatcaacagcgtgtctgggagatagacactaaacaaaaagcgatcccttatttgaatacacatgtcctgtgttatgaaagagacacccacaatcttatgaaggcacagagtaaggggattcccatctgttctaagcctcttgagccccataaggtgaccagcatcacctgtatgtgtagcatcccctgttctttgaggtcctttttttgttggatttctcagaaccccatcagctctatgtgaaaaatacagtctagtggctatggccccatacccatagaaatattaagcaaatctaggccccctttgactacctcactcttgggttctataaaagaggaagtaatgtaagttctccaaatattgaagttagttgacagtcatatctgcttcgtagttgatagtggtagatgagactcatgggaatctatgaagttactagagctttgtggaacattgttggagtggcaaaagaaggcaaattctggagaaacagaagatgccacacggagcagcactggggaaaatttatagtgtattctcaggttgtgatattaagcctctgtgtaggattaaaactttcagcttggacctagggtttgatagcatctatgtttgaagtagcttgtggactgacttcctgtggtcatgcaggtacatcctttgggctcagacaagatgagcagctatgcactctgggatatgaatgtcaatctatttggcttcagggacttcactgctttatctttaagataattgctgactctgaagatgatgaaagtagattctttcagactagtgctacggatgtggtgagaaaacaaacattcaaagtcaaatgcaggagatgatagaaaaaaatgtttaccaaatggtataggcagagactgccccacatgatctattgtcggcaaccgtgtctgatacaagagagaaaagtgaagggtgtctgctccatcatggtgatagcatccttctcatcttcttgtacttccttgggtaggtgagatagggatggagatacaaatattacatcccaccagaagatacaaccctttgaggcagcaaaccacaagcttgctatccatcacctgcatctgggctcacacttgtcatgtcatccagctgagtatctctaagcaatagagcaatcaactccgtcgaaataactcctcccacagtaagaaatgtgagggtagcgtagttttagtatctcagtgatattgccaagacacatggctctctttttctaactttgcaccctgctattctcattatctcccaacaagtcttcctcatgttggccatctggcatccacagctccatgcatgaaaactctgtcagtaccaatcagcagaagggatgctttattcataagcacctcttttaaaatggagaggaggctttcttggggtctttgattgatttctcttttctttcatgggaccaataggaccacatgactggcaaggagaactcagaccacagtttggatttaagccaagcatgatctacccattggagatggaagtgtggtcctctcctctccagaacaggttctagatttctgtgcaaatttaagttcagttagatctatattgccatggtcacaacgtctgctatgatgtataaggtcacagaaagtatcaatcgatatggtagaactacagtttaagactcagtatgtggcaaagccaaaacttccaatttctctgagccacaccctccagctttttctgagaagctgcccttcatggccaggctttttgagactcattacaatttgaacctccttggtctatctatgtcttttctcagttccaatagctataaacatatcttttcatttcttccagaaaagggaataaaacattgagacacaaccttaaacttgtattaatttatacgagatagctcctggactcctctttcgcttgcttgagcactttattactggaaactcatgacttgcagcccatctccacacagctggagctgccccatacatgaggaccacttctctgcagtgatccattaaaaaagaattaccctgaccttggatgagcatctcttcctgtaagttctgagatgatgacccccaagggggatggccagcttcccctttctattacatttttccactggagtgttttaatgtgtatgaagtgttttcagctccattatctaatccagtattcacattaacttcgtggttagcattattatactctttttttccctaaccgtagtgaagttttaatgattttttttctcccaagttcacttcaagtcaaggtcagagctaattagtgtactctgaggatttgactcctagatgatagcttcagaacccatgtgtgtaccttcataccatattagctccttgggggctgatttagctttagggagtctggaattgactactgaatcgtatactaatattgtctgtcacaggtgggaagagcccttccttctagttcctttgagttcaaagttcaagtgttcaatatattaaccttttgataaatctgaggacaagatgggggttttgttttgttttgtggtctaatcccctgccccagtgcatttagctcagcagtctaacatcctgagagagggagaggccttcaggatttacaaaaaatcattggccatttcatacatgcatattaagattttgagtcactcctccccaccccctagtctcttctttaatttggtctttagccaaagcctttcttcttccccatgggtccgcttcttgccctcaagtnnnnnnnnnnnnnnnnnnnncccatgggtccgcttcttgccctcaagtctgtttttgtgtgtgagtgactggctttagttatagttgctcccatgagcatggtggggaagctatttcctgggacaccagccccttatcagtggctacaccactgaagaaagtgactccctgtctcccagcaaccactgactgctgctagtttcttagggagcggtgaggcctcattatcgtctcctctattcacgatgaaacgttggcaggtccaatcttgtgcaggttaccacagccacggagagttaatgagtgttgcagtcacgtcatgtccaggatgtctttttggagcacagatccccatcccccagctcttacattctttccttcttgtggtgattttccattcctctttggttgcctaaatacagtttaaggatttttgacactatccaaggatgtttaaagacgggtctcacagatgtgattatttagtagagaagaaggaagccaggtttttctctacctaatgatgaaggagctagaggaaacagattctcttgagccaacatcactgtattttgagataaatttcatggcggtgcaccttgctggacttcagcttgttgaatcagttcctaactcatccttcagttcccagctgggaccttgcagagcaaaagcttgctgctagaacgagctcttgggtcccaccacaccttgtgctcctaccatgactcactgttctgtatagttgacttgtctaatgtctggcttctccactgggccataacttttattggaatagtgaccccgtgagccttatttaatgtcctgaccccagaagcatagtaccctgcacatagaatcattggaagaatcctcattgaataaatgaggttggaactggaattcttttctctgaaggcttgtgatctactttaggattagaaaggtttaggtgagattatggttagacatggtgagtttagactaagtttgaaattgaattttttgaaaaaaacaaaacaaaacaatgtctctctattgtctatctggcaatgaatctaacactctatctatctatctatctgtctgtctgtctgtctgtctgtctgtctggtatcatctatctatctgccatatatgtacttgcattatttacatttagcttctaagcctatcatttatcaatttatactatctctttaaactattttcatattctctcttgcacacacacacacacacacacacacacacacacacacacaagcacacatgaaagatctctcatcaagcaggcttcatctccttccatccttcctttgtctggtacctatcattgcgctgtcctcagtctctccacaagtgacatcatccacgagattctcttctgtgtttttcttaaatgctgccacacagaagctgaacgtgtgcagcatctgaccactcagatacatgtgaaggacagaagaagtgttcttctaaacccagcactgtgggggtcaggttcgtggaagcaagctgtggatactccaggccctttttgatggagcacaaagtgaagttcccaaagttcttcagagatgtgtttgaaagaattctctcttattttaaacaagcaccattaggtaaactccaggcttcctttagctgctgcctcttcatagggggaaaaatgcccctttattaagtgtgtgagcttcctgtttctgtttttggagtgttacagtcatcagccacttctggattccgcattgtttgcattgttaaaaaccttggaaaactcatctggtttcttctccaaacaagtttcccagacacccccaacccccaacccccgggaaggcattcagaaacaggccccagtttcaaacaggcgaccaagaaacaatgtctcctagagccaggcagtttatctttttctaaagtctggaataaaaaatgtttactccagaccacatagttaagtcctgactgtcagagtcgtctgtgtcctgtatgctcaagatgtaatgtgggtcctggcatcacagctggattctagtcctgccacttgccagttacactgccttaagtgatgcacttagcctctccatgtctcatttgtctcttctctgaaacggaggcttaattcccacggcttaagcactgctgggatgctgtacatgaagcccttgatagaaagtctggcatggaacaagcattcaagagtaataattatgatcattgttacaatcctaaggctccaaggcctctctcttccccattcagtcctaactatgctcctggtacatttgaggaacgcttccaactgccttgggaaagtcttcatttcatttctgagcatagttagctgatgaattctcatttcatttggcggggtcagcatcctaaaattgtgactcccgcacaggcttactggaacgctttcggagcagatgaagcaggctgtgaagttccgggaaccttggctgtagctggtgaaagcaaactgggaagcacgctttggggcctgtctttacttgcacaattacagtcaatctctcaggctgcctgtgtcagcaggatcagcctttcctgcctcccgttcttccagttactgggggcaaggggaggagtggcttttgcctgtgtgtgtgtgtgtgtgtgtgtgtgtgtgtgtgtgtgtacatgaggtgtaagcatggactgtgagcatgactgcatacaggtgtgcatgataaggccagatgatgcctggatgtttttatctttctctacctcattgtttggagacaagggttcttcctaaacctggatcttacctgttcagtgagattagctggccagtgatttccagagactcccccatttctccttccccaacattggggttataggcacagcccccctgacattatagatagaggctagaagtctgatctcagtttctcatgtttgtgtggcaaccatattgcctactgagccacacctccccatccccccaccccaggctgtagcaacacttctttacagtgttgttctgtggcctcggagcacagaggagcctttagggggttagttcaatgcaatagcttctctctgctggagtttctcagggcccacacccttcccacaagtcccagcttgggggccagtttctgagtgcataaagtaaatgcctccctgcctgtcattgggatgttcaattctttcacctccaaaaatacctgtaattgcctttaactgcttagttctgctgtcctccaaaagccactcccagccacacccccacaatgagcaaggctttttacaccttttaaaaggagtatttgcatctgagtcagctttccatcttccttctatttcatgagagtttggcttaatgttgtttggaacgaaactgcagattatcaaagcaaggatgacttttcattgcataaagacataatagattcaaaactcaaaggattccttggtatcagggggagtcaaggccagttgcctatggagaagagcatttactgagcatgtactatggtctacttccttgatggcaatttgcatgcatttactgtcttacattcgtctattcttccgagtaaatatgtattgaataaacaagcgacacttcttcagcgtcacgggagtctgagaaatggaggctcatgaattggaatcatttaagatgcctcagatcctatgtgctgggatagcatttaactcagagtcacctcccctccctcccatgatcccaccagttcacctttgtctggttaattctagtcttctgctctctggactcagacctagaaaagtcaaggtctctttcgtgtctttgtggaatttagattaaataaatcttttttttttttttctggatcgttgagtaaaaagactcagttgtaataactcagaaaggctgataagcaggaaaggggagggtgagagtttttctcttttctcagggacaatgggcccttaaagaccaccagtggccagggatccagctagggggcagttctccactgtccccactgagcagcttctcaggcaaggaccatcccaggactgtagaatggtttgaattggtcccaaataccgaaattcactgcagggcacactggggatgtttgtggtaatttaggaagattctctctaaggaaattagcaactctgttgtgttttacttaattgaaaccattctttgcctagagctccattgatgggtggactcactgcaatttgagaacaggatgctatccacactttttgttttgtctgctctttcactctgctggccagtccactctgcttgaaatattcattacatcctagctgtccagataacagagcaaaatgccactagccagtccctggatcactgggaaagttaatcagctttctcacagacctcttctagctgcagagggctgggttgggaactagagattctcaaattccacttctttgatgagaatgctgggatccagagagctgaagtgattctttaagtactcataacttactagtaaggagatgagcacagagatccatgtcaaataagtgctttcattactacatcagagatattttgtgtcacactctctgacaccatggataaaaagacgaataaggttgggtctaatgggacccttactggttggatggggcagatttctaatatatatagtgttctttataaaaaaaaaatggatctgtctaatgtgccagatcaatttagtcctatcatctatctatctatctatctatccatctacctatctatcatctatctctaccctctatctatgtatttttctattcatcacccataatctcttactcacaatatgagttgtaagaagccacataactgggtagccagggctgatccctaaacatcttgagggctggaggtctttggcattaattaaggatataataactgatcattaattaagttatcacagaggtgctttacctataggcttctttgaagacacctactggccaatagctaccaagtactaagcactttgctaagactcaggcactttgcccagtgccttatctgcagtccttcatttcatccttaaaagcactccatgaagaaagcatgacctttgcttcaccagtgaagaacctgaggctcaaaagttaaaaatgacaagccccacatagcctcactgagagtagggccccacgtgtggacaatgatccagatgatcttgtgaggttaaagccctaacatttccaagtaatggaattaaagtaatactagcacggatgatcagagtcacagttaggctactctggaaccctggattgccttgagttcatggctaagatctggaagggatagatacagctctactatccccaatcctgaaaccagcttgtgatccgaatggagcccttgtcctcaaagccaggacattcagtagccatgcgcttaccttccagttctctcttgcctatcttaccgagtccaaatgctagaggcatctagaggacatcaaaaggagatattttgatccctggaagatgaatatgaatcctaaatttattttaatctggagatgggtagaggagaaattccattttgtccagtgtattgcttatatttttcatgcctgtgagcaaatacctggcagaaagggggtgaaggaaagagggtttctttggacttatggttaaagagagtacagtcactgtggtgggaaaagcatgacagagttcatggtagctggagcatatcacaccaggaggcaggggacagggattctggcattcccttcaccccatttatatttagtccagaaccccagcccaagggatggtgccagctagacctagggctggccttccttcctctggaaagcttctctgaaaaaaaaaatcactcctaggcataccaaggagtgtgtcccccaggccattccaaatccagtcaagttgacaacgggcagtgagtcaccacaccaagagtcagatcctacccaagcccagtaaacaaacaaacaaataaaagaagggcaccctttcttaggagagtgagcttaagagcacactggtcccctgccagtgcagctccagctatggtgacagacaatgccttgttttgttttctgtctagcattgttggtctcagacactgcctcattcataggttagtggcttccctgtgtgctctttgtttcttcatacactctttgatggcagggatttgtccttatcacttgtacccagggtcacagctggcatacacttccatattttatggatgaccctgtgagtcaagacctttcaccgtgtccttattctaggctggtgattgtttggcatgaacacgtgtgtgtgtgtgtgtgtgtgtgtgtgtgtgtgtgtgtgtgtgtgtgtgtgtgtcagattttatcccacctggccattgttctcacccaaaattttctagaggtctctgtagcaaaagaagagccctttggcaggtctgctcccttgtcattttgaatggccatttattttaagggaaattaacatcttattttcttttggcatcttgatagaggggtcatttgtatcttcctgtatttccagacttctgggttttcaaataagctgtcttccctaataacgggaagttatgtttggcccactccatgtgagaatgtaacacatgctaagactcttgtccaaaccctgtggctttacttagatgtaagagcttgttaaaaatgagttctgggagcttggcatttgagaccggcatcactgttacagatgtagttgcacaggttgaaagcacaaagagggatggatcacaatcactaggtgatttgaaaagtcctaaccctggacatcctttggcccagatttttaaaatccccacccacacagcccagcctctgatggatctgttttaccctgttcgtatgttcaaagtgtctgcagaacgaacaagagtcaggctcacggaggagacaggcaccttcgtggcatccctacctactcactttagcacacaacatgaaaagagaaaatgagaaacaagagatggcaatgttgcaatgaggcctgatggttttggtgcctccgatttgggaagtggtgggaacctagaactcggtctagttgcaatgctttgtcattgcaaatacagctatgtcacctcactatgttctgataaactggaagatggtgaggaagtaatctaaaggcatgactctagtttggcttttttgtttttttgagacaagggtatttttttatgtagcccaagatgacccagagctcatgataattcctatctatgctggatagtttcatgtcaatttgacacaagctagagttatttgagaggagtgaactccaatcaagaaaaagcctccataataccagaatgtagaaatgactgtagagcactttcttaattagtgattgatgggggaagacccaacccagtgtgggtggtgccacccgtggactggtggtcctgtgttctataagaaagtaggctgagtaagccatacagagcaaacaaaacagtgagcagcagacctctagggcctttaaatctacttatgcctccaggtacccataggatttgggttcctgccttggtacccatcagtggatcctggctcagtatatataagccaaataaacccttttctccacaagttgctttgggtcatgatgttttatcacaacaatagtaaccctgattaagacaccaacttagcctctggagttgttccatcctaatccaccttaagtcagtattgtctacaaggtgagctacagataagtgttaagtcttatgggcaacttaatttattactaaactcatagctatccagataaggctttttgagtaatgccaggaagaggccactgggggtagaaaactatctagtgctactagactatgagtgtcaccattcgacccaggaactgaagtgataacatggagggaggggctacaaagatcaatctaaatagtatttgaactagattttgtttgtcatggcagagcagaggtcttgtcctgcctactactctagccaagcagaaatccaatctgttcgttaggatttttcttttcatctaggtccccaaacggtccaccctgttagacacagagctcttaagtcccagtgcagtgcagatttctgtataaaattctccaccctaaagagagaaagaaataatcatctcccatcgatattctaattccaactcaatttgcatggaattagaatattgagtcccttgccttgaaactgtctaggaagaggcctgacttcccttctcttgtggaatttctggaagccaaggtaagaggctgccacttgtgcttccatgagaaaacaggaaggcctttgcttgacatctaatccttgggtaggttgttaaacttctcagtctcagtgttgccatctgctctctgcataaaggcttgtgatggttaccacacttatctcagatgactgttgttagatgaggaaatcgctgtgcagggactagcagatgcaaaccatgtgcccctttgtgttaacccagctcagaagcccagacaagggctcagaggctgaaataatcagagccagtgtttcccagcctgctatgccccacaattggcttacatgttaagtatcccaagcaggcagccatggctttcatgagctgagtctctgcttactacctctgcctctatcttttgccactttcatgataagagctgggctcaatgggcttcctctcagatgaggaaggtcacttattcaacctctggatgctgtgcagagagtcccaggatgcagaatcttcaggacacttgggctgccatcccacacagagtagcagctctggacacactgcaatcttttcacttccactcaaaaagaggctaaaagagacagatagaaggaaaggaaaaacaataggtcctaccttggactttaggtggtagatgagctttgtaggaactggaagtggcctttcgcattcctcctctgagtgaccccatcttgaagggcaataagccgtacttcagtgactgagtcttgatatttcatcaggtccactgtttatccagcagtcacagtaatgtatcagtcacagaaatgtacccagccatggcagaatgtacaaaaagtccgaacttttctattttcctctctgcaaggtcagataatagtgatcttcaaggaggtctcttttgcaaggtacttttatgtttgaaacaaggagagaaatactaaggttatactaggcaaatgagttctaaagcatttttgcatgatgtatcttatatgtgacactcttagagcttcagggccctgtgctaattgctccttgtctgtttccatagacatcagtggggtgacccattttcctggcactttcaagttaagactgaccaaatgatgagtatcatgtaatgactggcctctacctcagagttttccagactggtttagatattcccataggggagtttgagagggccagggtcactgaaggggtaggctaggtactgaggtgagactaaacaaggtggattcaggctctaggtctatctcaaagccctcattctggctccacctcagataacgatacttactggtcttagccatcctgaatctttccagtgcatcatggtagcaaaagaaagatagagcactactctgctctataaatgctgctgttgcccctccttatcctggcatcaacccaagaagatctaggtagactcagaagatctgaggcaacatctatgttcatcaaactctccctgcatctcttgttccttaaattctccatctgtaaagtgggtgcatagtaccgacccttaaggcttcaaaggactgttttggtatgcttgtgttgcgtatctcatgagataaagtcctattaacaaggtgatccaggtctaaagtacacgatgcattctgttctacagagagtgacaccaacacatgtctttattcctgtgggaattttatggccctttctgatatttgaatgtgcctcaggtatgcaaacccatactctgagcccttttatctcacaagtcctgaagatgtcctagctttgatgctatcaattagttttatttagatttgagattacccgtgactagtgattatactatttagttagtattatgatttctattctcttaaaaatgattttccaggtgacatgtgtgtgattgcataaggctatttccataaaaaaaaaaaaaccatacaaagccttttgagcatattctcattttactgaaggagagagaaaggctagatgtgtcacagatcctactgcaagtagttcaaggtcacgtagcttatagtgaataggatttgggtgtgacccgtgcatcctccttctagatggagactggctcaccagcatgccaggactcactgatcgcttctcaagtgcagataataacaagtaaccgcttcttattctgctttgtctctcacgaggtccctctcttgatctgccagtctttcaaagtgctgcctctagacttgtgcagaaggtgtactctaattagatgatgtcaaagtaattacagctgcccagaaaaaaaaataactgcaagacaaagtggagctgtcgttcttgcctctccgaactgcagcgggaaaaaccgtatgtggccttctgctgctttgtcagtccacttaaccacatcctgagtttgtgctagtcaatctgctaaatcaataagatccaaaagtggaaaaaaaacaaaacaaaacaaaaaaccaaaggtgttaaggccagtggatttcctggttgccatggcaacacacaagggtacacactgtggtttcttgtttcatctgtcttcctggaggcttgttccccatggaggacttggacttacagaactcctatttagtgagataaaactaggggcaagcaagcaccttgatagatccagaagaaggggggaaatcttcagcagggtcttactgcccatgtacccaacacagaagcaaaaggcaggaagaaggcttcttctcacgttctaaaaacaactcaaggcatctctagactatgcaatgggttggctatttggaggacttggcagaatggcccgggtgacagcttctaagggggttgctctttcatagagtcctgttggctcatgatggactccttgttccttaaactagagactgagaggtcagggtgtccagccaggcccccagacattggggtgcctttcccctttgagtgccaagagatgaatagctcaactaaaagcaccccatgacaaattctgaaggaaattccctccatatgattgtgcatgactgtcttctctgctcattaaaacttcacccgccttgggggtgattccgggagagactgagtcactagttactcatggtctgcagtgggcagccaaaggctatctagcaccaagaatgattttggcctcattcaaaagtagatgctgaacaatatactctttcattaggcacccgtcacatgggagtcagacgatggcacaagtggtgtaggggcaatgggaaagctgccagccttcttctgtactggcaggtttggtggaagcaggggctatacagcttgaatggttcccagatggaaacttctgagctgcaaagacatcgcacaagtggaaaaagagtgacttgcccatgatgtacttcggaatgatgctccctggccatgagttgtagatttattgggaacagcatgctcaaacatcttataaaatatactttgttagaagcattgtaccaggagtcaggatgctgcaattaaagtcccctgagattgtgctttcttcataatggtctaggggaccaagctctcaattttattttcttgtttctcacagctaatttgtttaaggccctttattgtcctacctttaatcatggatgatctaattaccaatatgtttttgttttttgttgtttttttttttaaagaaaaatggcacgttccctacttgcttctaatcagaatcagcagagctaggctcatgaattgtgtcatcttctgtgtaagatgtaagctctgcaagtcagagggcagtaaaagagccttggatttaaatgccaaacactgtgaaagtaaaacccacatgtgcactggttgccactcactgcccacgcaattagtgtggcagtctcatagggggctagattctgttaaggaccatcaagcaagggtgtcaggttccagctccatcagcctagcacatctacttggtaagtctagacctttgggattgccaatagacatttcggaaagtcacaagtggacccagctgtggatcaaagcagaatgccagctcttctcattagctctgcctgagcatggctggagcacttgggatataaaggacagaaggctgaaactgcagccaggactgaaccattccaattctcaaaaatgtcttgagaagagaacaggataagatcagagagaatctcggttggataaagccagtgaacaagttgcagttcaggaactcttccctgagagaggataacagatccaatagtatggtgatttttccactgtagcaactcagacctgttgggtgaagaccttcccccttcaggcagagtaaaggaaattgggtaacaaatgggattctgatagtgttcagatctgttccatgtctaactaccacttaaccctgtgactcaaacagcctgactgttcagtctgtacctggctctaccacttccttaagacttctcaatgaattaatcaatgcatgtgaggtgtggttaataaaagaacatgctccataggattgtcgtgagaataaaatgaattattaggtgcaaaactattgaaaactgtaacatcacccagaaaaggcgctgtctttgcttgctggtgttcctacaacccatgataagtaaactgtggtaattaggcaagtcacggaacacaggaaactggtctggcttctatgtctactatctctaagacggcgacttttctccaccacagtctactgtgagccaaatcaacagaaaaatacttaattctgcctcataactcttggggagagagcagaaaagaccaagcatatggctagttcatgctagcaagcatcaattcttttggggtcatctaaagaagggagagttggagagctatccacctctcttgggcacagtgtgttcataagtgtctcctggtggtctgcatgtgtgatatattgctgtctattttcaggaggtctaacttcataaatgatcgccaaacttgtgcaaatgtgttgtatccattacagagatgatgtcttcaaaagccagttacaaaaacacaagcggtcttcaggaacattttcttttatggaaaatagcaagtgttcagaaacagcttcaggctcagacatttttagtggccaatagagaatccttaaagaagcctgattggtgactcttggtagatatcaggagagcacaggaaagccgatctatttgtggccagaagtctatcttccttcttctagagcaggctctactctcactcacctctcgagcaactttgggaaaatgcagataatggaaacctgagtggaaattacatagtggctccttctttgatgatgttatgattttcttccagttgggaaatgactgggtgtatgaagaatccatttctctctgacttcacaatgtaagcaaagtgttgaagtgggtgatttccctagtgaaatcatatttttcttgatcagagataaggtggatggtgccataaaatagttatgccttttctgagagtgagttttaaccatagcccacaacaggttagaaatctgacccttccatttggatgagtttggtcatgacttagtgcctcagattcttcgtctctaaaatgggctttccatactcttccccaagaatgattgctttaattggttatctaacattaagtgggcagacctgaagtcatatacctaaaagtaacattacaggaattgaacattgaaactctctctctctctctctctctctctccctctctctctctctctctctctctcaagtggtcttgagagggagcaaggatggtatgggagagtttggagagaggaaggggaaaattaggcaattatactttaatttcaaaactaatatttttagaaaaatgactttgccaatgtgctgacctcataagactcagatgagaattaagttagatgaagttcataaggcagttggcaaatctccaatactcacagcctcaattactataagctccatttttaccagtttcatttagtgagtcccacagactctagcaggttggtagcgtggtccctttagcaaggctgagcaccagagatgttaagcagctccctggctgtgccatctcttgggagtggcagagtctgggaggatctgaactcagttaagctatttccttctcaggtattatggacacactcaggtgtctccttccccttgatcttggggaatcttggatgatgaacctagagatgaccctgccctgctcatagcctgtcataatacgcactctaagggagcggcatgtccctggaggcttctctctcaatcagaaagtagctccagtctacatctttcattgagcccattctgtctctctaagggaggggcttcgaacagttcaattcattgtaagataaaggagatttattggagaccagagggttccgaagaaaacattcttgaagtatcttcatatggaaaggcttgtttaagagatacaattgccatttaatataagcctacttgtgtgtgtgtgtgtgtgtgtgtgtgtgtgtgtgtgtgtggtatacccacacatgtacatgcctgtatatgggtgcacatgtgtgggtgtttaggtgtttgcacacatacagaggtcagaggacagcatatctctcactccttagaagctgtttatttttttcttcaatacagtgtctctcactgtcctggagatcaccatgaaaactaaggctagtagccgtcctgtaagtcctggatatcagtctgcctgtttccccagcactggattctaagagtgtaccaccaaaccagctttcttataggacctagtgctttttcagcaagctttttatgggctgagttatctttcctagccttagtatttgtcacccaagtcataggactcctagatggcagaggcgttgtttctgaggaaacaactgtagacagacagaagctcatcctccatactcgaagcttggtccatcgctgccatggatacttgtgccctgctggagatgatctttggttcatgctgctcccctctcacccttcccttcatgatgggaacaatgttggctatgcacgggtgggataaggaagcaggagcgttacctatcctggggttaggagaagaaagtagtggtgaagcttgcgggttccaggaggccagtccaggtgggtttgaatgtctgcttcaccatcacagctcagtgatctcgggcatgtttctatagtctctcctctctgtgcctcactttctctatctggaaagtggtaattaatattacctgcctcttaaaggtgttttaaggagcagattagttagcacttgtaaaatgcttgtaagagtgcctgacatctacacaagcactcacttctgctatcgttcttggagagtctgaatgccttcataaattgccaggacttaaatgacacacagagttcaaggtttggcccattttaatgcaagagtgacccagagaggatggatggcttatcagcatgatagttgatcttgatgtctggggcaccatcattgcaattcctaagtgtccaaatgccatgagggttaggatctggattctgtctcacgagattaaaataagcacaagcgtgtacttaatattttctgagaatttcttattgacccagcagccattttcagatgctggcagtgtgtcaggcccctggctaaggtagcaaggtgaagactgagtttgtctgtcttcttctgcccttgatggttcacgcacacacagagtcaattacagggacacttagcaaataaccaccacatgtccacacactatcctaaaagtcacattggttgttgcacatggaacatgaggggctttactcaaaagtcacagcttgcattgggttctcttgcatttgcatatccaatctgccaggtggccagctagaattgattttcataagaaagaaactgcctctcatctcccaaccattgtccaagcctctgcctttatttttaaaccaggagttgacagcaaccacctgggtcaggaaccggcaggtggcatctgactgaagtcaccttagcagctctacctacaagaagctgattcaaacatttctctttttttctctttctttctctctttttctctttctctctctctttctttctttctctttctctctctctttcttcctttctttcttccctccctccctctctctctttctttctttcttcctttctttccttcttccttccttcctttcttcctttctttctttctttctttctttctctctctcttttttctttcctccctccctctctctctttctttcttccttcctttctttctttctttctttctttctttctttctttctttttctttctttctttctttctttctttctttctttctttcttccttctttccttccttccttcctttctttctttctttctttctttctttctttctttctttctttctttctcttatctatgctggagcagggagaggccctggaagggctgtctctctgagtgacagcttccctttgtgaaactggtcaactgaaacctaagctgcaaatgtcagtaaaaataaatagtatttcaaagggactttgtgcatttccttcctctgtgtgctgttgcttcacccgccaagaactgcacgagtgcctgcagagagcacactgggccccagagataaggaattaactgcacaaaacctcctttcttcatttgtctgcttccagtgtttcatgatttttttgttgttggtggtggtggtttttggtttgttttgttttgtttgtttgtttttatggtacctgcttgctgaaaacagaaaccaaagaaaagaagccaactgatattggcttacatgccttcttaagggtgccttctttcttggttttgcatctgtctgacgctgttcggaatctgcttcctgctttagaagcgagcagctgtcacctgcacagtttcagaataatgggcccacttttgtcatcatgaaacagttgtttgggtgtggctctcccctgttctaagcgtgaaggatcttctcagcacatgggaagctggttcaaaacactgtggggtgattgaacacactgagaggagttcccacctcagccatctaaaagctggggaattgtgcacgttgctttattttcccccagcttctgtttcttgacatttaaatatatatacaaagctttttttttttttagagtacagatgacagaatcccaagagttcaggacatcaaggaacaatttagggaaaaaaccctcctctcccactatgatccactctgaaatgaaatgtagaacaaagcagggtccaggtggagcatgtggctctagatagaaatggtcacttccttcagcaactcctttctttaccttgtattctcttgttggtaaatgctgagctttggagggtccagagtctgggttaaagccacttctttctgtctcaagacccagagtcaggcacattctccgtcactgctgagagaaaatgtcgtgaggtgacaattcagaatataattgaaccatccctgccactatgaggacagagcatttcatgtagaagagaattcagggctgtgttctcaggcctgaggtgttcagaatggctgatggcattgagggaaaattgtagttggaagagagccagcaactcccgggctagagagggagagagactatagccagatcacattgttcttgaccagaaggaagtttattctgggtgcagctgaatgtatagtgctagaagtgataaggcaaggggtaacaccagttgattgtggaaatgtgtattatgagcacatttccagttgattgtggaaatgtgctcataatacaagaataggtgggaaacagagtgtgggtatgcatgtgtgtgtatctctgtgtgtctgtgtctgtgtgtgtgtctctgtgtgtagctttcttagaagttggcttgtgtttctttattactcttttggatattattttgtctgtttcctatgactttatattaatttgaagaatgggcctaaaaaagtcattattaacgaagatactttaaggatggggtccattatgatatcatacgtcagatctgagggtcccttataatgtcacatctcagatttaagcttgatgtatctttggaaagccaaagtgaattttgaaggccatgtcagtagtgttgtttatttggatttttgttgttctgagacaaggtcttacactgtagttgaccccgattcaccatgtagcccaggctggtcttgaactcaggtgatcctcctgcctcagcctcccaagtgtgggatttcaactgtgagatactatgtgctgttacttggttttcatgtgtgtgcatgtgtgtgtaggttctcatttgtgtgcctgttcatacaagcatgttcaggcaagagaaaaacattggctttcattcctcaggtgtcatctaccttgtttttagacacaaggccacttattgggctggaacgcaccaagaaggctaagctggttgggctgcgagcccatgggatctacctgttaatccaaccctaatattgcaagtgctggccaccatacccaggttttttgtttttttgtttttaatttttatttatttatttttttaattaggtattttcctcatttacatttccaatgttatcccaaaagtcccccataccccccctcccctacccacccactcctactttttggccctggcgttcccctgtactggagcatataaagtttgcaagtccaatgggcctctctttccagtggtggccgactaggccatcttttgatacatatgcagctagagtcaagagctccgggcatacccaggtttttataggtggattttgagggattaaactcaggttcccatgctcacaaggcaagcacttcactggctgagccatcaccccagctgcatgtttggcttctcccaatgccccatctggcgtggtttttttttttttttaagtcttcacttacaagcacttcttaccattgatctagtttcatgcaaattattaatgcaaaagcctctaacatctccgtttcctcccacagatttgaatgtaacctgccgctacgcaggtgtattccatgtggagaaaaatggccgctacagtatctcccggactgaggcagctgacctctgccaggctttcaacagtaccttacccaccatggaccaaatgaagttggccctgagcaagggttttgaaacatgcaggtaagagagcagcaccttcactgggaaaagcccactggttggggcggcgcttatggctggaaggctcctccctgacagttgaataagttcttgcctaaagaggcagccctacctattaatttggccaagtcaaactgaaaccggtatgacaactggaatttaaagtcggctaaagacacctttgtgaatcatagggagggaggccagaggaagccattagggtcatatcagttgcaaccctctggcctaatgtgctcctgtagcactctcctggctttgaagaggcattcagtatcactgtaggaaccacaagaaaatgcaagccaaataacagtgtttaagataaataggtagctggcagagtcttgactgtgcagacttgacacaaagcacgttcttcaaacctctctctctctctcccccacctctctctgagcttttatgttgagcttctatgctgctatggtttgacaaattaagtaaaatgatgtggaagttttaaagctgtattacattaaagttattatcagaagccttgagaagtcttttacaaggtacacaggttcccagaggaccttcctcaaatcattttgttccaggataattgatagaggcagagaacattttatatatatgtatatatgtatatatatatatatataatttatattatttattattataatgaatagtatatataatactatatattatgccaatatattatatagactatatataatataaatacatataatatataaagtaatacatattatatgttatacatatacatattttgtttcctgtcactactgtgttagtgtgtatgtgtgtgtgtgtgtgtgtgtgtacttttttgtggtcagtggtatgcatgaagaggggcttagtgacaacttcaattgagtaattagtgtggtttgagttccccagaagaattagatagttttcataagggctctgaatgcccaccccagcccatagcttaggcactgtagctcccttcctgcggctaagcccacatgtgttcccacacacatgcgaacaatgcttttagaaagtctagtgcagacctctttgtgcaagctattaaacgcaagttaattgcatctgtccccagcccttagttacagactcaggcacccaccacttgaatggcaactgagactcttgctctgcctaatatagtaaccatgagccacacatggtgcattatatttaagttaattaaaagtaggttatatgaaaatgagttctttgatggcactagctgagtttcaattgcctggtagctgccgtatcaaacggcatggcttagggtagagactatttccattgtttaagagtgttctcttgagtagcgctagctaggcatctgtctgtaactgtccagagctaagtctgagggatgttaatgaaggtgtgatggctctgcagctataggttgtgactcattagcttcatgaaggatggccagttaacaaaacctactcctaaggctatgctttacaatgtggtctgactaggtcgctgtgttaagaaagtgtttttaggaagctggtctatggttgtgaaatgcagttaagacatacttttgaaatagagggtttttttgttttgttttgttttgttttgtttttggtttgtttgtttgttttacctgttgagagctagagggaaaaaatacagaatattaagctgccaggataatgccaaaggcatcctttaccttaatccttaaactgccctgtttatttctaagacattttgtagaggaagcagccgagccccacagcttgtcatggatacactgcttatacttagacgagtcacagtctgctgtgatcagtctgaacataatgactaagtcctcccaagggacagaggataaagggagaggatgcaaggacttgtctttcctcctgttgacagtcactcactaaggccatatatacttataggaattttaatgtccccaactcatgtatagaacatgcacatataagtgacaggtagaatgatatagtgaaaaaaatcacaataatacacacacacacacacacacacatatatatatgtgtatatatatatgcatatatatatatatatatatatatatatatatatatatatatatcaattttccaacatgatgtggaggggcaaggtaaagagtaatttcactgttgagtattatttagaaaataagcagaaaaaaacctctgctgcagaaatctgtcatcgcacccataactggtattaagtgtttcaaaactcactttcataatttccctgaggtagctaaggaatctgatatctgccaaaaaccagaagggatcgtctcacaggttcagccaaagcctcagcaacgacttctgtcttgtctgccccaccctgtttagtggcaactctcaggtccatgagaacttattaacgtttaattgtgtgccctcccaccactgagctaaagagactctgggaaatcagtctgtccgtttggacggggaattagtcattcagcttccattgcaacacccacataatgagagactttatgcttaggagcttccaagtcatgctcattgtcacgggtcttgcagggtgctggggtctgttctgttgtccctgcagaagagggtaaaagaaggaaaagatgctgcgtttgagcttgcacaacatgtctcaaaccctgctaatttagcatctccctttttgctctcttgatgtcatacacccttttccattcaagtaacattttctcagtccatatccatgtcttgagacattttatatttctgttatatggccactagggtgcttctgagggtggtggtaatatgcattgtatctgaaaaggcccccagacctaaatggctctcagaatcacctagatgggtgtgggagtggatagtgtgttactctcttgagagctttgttaagtgagccactgccatccacttctgtaattgctgttgctctcagctcaaggatagcaaatttatctccatgggtcttggatggtgacaaagccagatacgccatgtgctcagcacaggagcaaggcttcatgctggcgatagtggggtaaaaaaatgagtctcgagggagaaggcaagaacaggaaagaagaggagaatgggcaataagacaggtctggagtcttagactgaacggaaggccaattcacttgttatcttgagagattgggtcattttatgtcatttttgaaaaatataaagctaatttggtgtcaagtcttacagtgtaacttttttcttctgtaacttaggcttcttgatgcctttaagaacattgctgaccttacattttatatgggactattgttttgtatgtgtggacctttaaaaaaattatctaaaaacaacaaaaatctccagcctttaaagaaactagttttgcctctgtccatcttcatctctctcatcctccaatgctgttgttattggatgttacataattcagttgttggaacccctaacatttccagagaagtgttatgccatattaaatgtcatttgatggggttttatgaagtggcatcccagacgttcatgtctattgcttcttgtttttccttggcaggtatgggttcatagaaggaaatgtggtaattccgaggattcatcccaacgctatctgtgcagccaaccacacaggagtatatatcctcgtcacgtccaacacctcccactatgacacatattgcttcaatgcctcaggttggttccaagtgcatggttttggggttgcctgtgggagcattggctgacaacagttctgttgaagcttgggtggagctttctgaagctcctactcaaaatgagtcctgaaggtttctacaatagaaggaacagccatgaacagcctgtgttcatggtaccaatgtgccaggcatatagagcagatgata

SEQ ID NO: 86 - DNA, 705 bp, Mus Musculus
aaaccacagccaacttccgaagcggtctcattgcccagcagcccccagccagtgacaggttccattcaccctcgttgcccttctccccacgacccttttccagaggcgactagatccctccgtttcatcccgcacgccatggacaagttttggtggcacacagcttggggactttgcctcttgcagttgagcctggcacatcagcagatcgatttgaatgtaacctgccgctacgcaggtgtattccatgtggagaaaaatggccgctacagtatctcccggactgaggcagctgacctctgccaggctttcaacagtaccttacccaccatggaccaaatgaagttggccctgagcaagggttttgaaacatgcaggtatgggttcatagaaggaaatgtggtaattccgaggattcatcccaacgctatctgtgcagccaaccacacaggagtatatatcctcgtcacgtccaacacctcccactatgacacatattgcttcaatgcctcaggttggttccaagtgcatggttttggggttgcctgtgggagcattggctgacaacagttctgttgaagcttgggtggagctttctgaagctcctactcaaaatgagtcctgaaggtttctacaatagaaggaacagccatgaacagcctgtgttcatggtaccaatgtgccaggcatatagagcagatgata

SEQ ID NO: 87 - protein, 187 aa, Mus Musculus
KPQPTSEAVSLPSSPQPVTGSIHPRCPSPHDPFPEATRSLRFIPHAMDKFWWHTAWGLCLLQLSLAHQQIDLNVTCRYAGVFHVEKNGRYSISRTEAADLCQAFNSTLPTMDQMKLALSKGFETCRYGFIEGNVVIPRIHPNAICAANHTGVYILVTSNTSHYDTYCFNASGWFQVHGFGVACGSIG

SEQ ID NO: 88 - DNA, 93550 bp, Homo Sapiens
gagaagaaagccagtgcgtctctgggcgcaggggccagtggggctcggaggcacaggcaccccgcgacactccaggttccccgacccacgtccctggcagccccgattatttacagcctcagcagagcacggggcgggggcagaggggcccgcccgggagggctgctacttcttaaaacctctgcgggctgcttagtcacagccccccttgcttgggtgtgtccttcgctcgctccctccctccgtcttaggtcactgttttcaacctcgaataaaaactgcagccaacttccgaggcagcctcattgcccagcggaccccagcctctgccaggttcggtccgccatcctcgtcccgtcctccgccggcccctgccccgcgcccagggatcctccagctcctttcgcccgcgccctccgttcgctccggacaccatggacaagttttggtggcacgcagcctggggactctgcctcgtgccgctgagcctggcgcagatcggtgagtgcccgccgcagcctgggcagcaagatgggtgcggggtgctcagcgcggacccggcggcagcccctccggctgagtcggccctgggggactggagtcaagtgagctgtctgcgaagtgcattgggctccggaaagcagggctgggatttgcgctaaaccgttggagaatgtgtctgtggaagcaccatttggttgaaagaaaaagagaaagagaagaaagtttgttgggcaggctgccggcgcgcagttttgggcgaggtcgctagagctgcagcacatggcagaaagtaaccgttctcccggatgcgcacagtcgttgtctggactaacaggctcctgtgcccaagggctcgccaagccccaccgggctgtgtctaggcagggcagagctgggcggggcagagactggggctggaacagggcgagtggctgttatcaaggtggtcacagaagggatcacaattccaagtgtgagactagctggcaatgggttttccagaaaggggtcctgggttctcccagctccccactgagccttgttccaaagcttacagtccgcagtgtcactgccaccttagcgctgtggaagcttgaaccagctctgcggtgaggtcttgggtctccatgagattccagcctgggatagggagcatgaatatgagaggcaaccactggaccagctgcttggtcctcaccacctcctgcttctgccaatcagtgtggggaaatctcaacagtaaggtggctcatattccctgcctggcagcctcagagcagagagaagagccttgataccagggcaacatcagggaccctggagctagggctccaatatctcatccaaacagggtcagtgctttgtggtggctatggaggggaggggctgcgtgtaaggtatattctagcacggctcaactccaagcattctctttctttgtctatgtatgtacagataattacatggccgatttgcttatcgctggccaaaattaatctttcttttaagaagtgccagctgggtcattaagacagctcagcctgcatgcagtaaattctactcagcaaatatttattaacccagttccacgggagtactgagaaattgaaacacacagtctcacccaggtagtttagattgagtacccagtataaagtatcttgaattactttctgctttctctatcttcctactttctgcagtaggaagaaagtgaccctaggtggaggctaggcaggatgagttctctgtgcatatgcatctccctttctgtgtgagtgagaggtctttgctaggtggggatttggggatctaggatttatactactgaagctgaaataataataataatgatagcaacaacacagcctgtcatggtggcccatgcctgtaatcctaggactttgggaggctgaggcagcaaattacccaaggtcaggagtttgagaccagccttggccaacatggtgaaaccccatctttacaaaaaatacaaaaattagcagggtgtggtggtgcacacctgtagtcccagctgcttgggacgctgaggcaggagaattgcttgaacctaggaggtgaaggttgcagtgaaccaagattatgccattgcactccagcctgggtgacaaagcgtgactctgttaaaaaaaaaaaaatgaatacagtgctagctaccatttactgtatattttcactgtgccaggcattatgttaaatattttccatgtgttatctcattctaccctcacaatggcctagtaagaagcttcctgttatcaggcctgtttgacaggaggaaaactgatgcttagagacgttaagtgacttgctggcattcacatagccaggagcagtgctggatggaaacccagctccactgagctccaaagcctaggcttagaatatgttagactgtataagatggacgaacttggaaggatttcagggagggaaggattttggtggactctaggccttagggaaagttccaaaagggactggagctcaaataagcccttgaaaagtggaaacattcaggatgggagagaagagtcaagctggagatcagggagagccctgggcctggcctgaaagaagagggccctggtggtttccctatagtctctagggaagtttatttgtatgttacctaccagtgccatcttctgctttgtctttgggcattctgactcctgactccttccaacctgtctccccgttccttctaaaaggccccacttccaaatatttggcactgtcctaacccttgaggttctcccagagacccgcagtctccctcctgccccgtgtttccacggcccctttgcgcagcatcatttagaggaagtacaatgaagtgccagtagcaataactgccccggccctcgctttcatgtgcttgtaaagttgtttggcaggaactgggacttggaaaggagacatgactttgtcagagggcttggggctgggcatggtgtgggtggcgaaggggagaaggaggaaaggggaaggaaaggagctcttgttgccccattctggggagtggtggactctggacaaccacgaggaaactttggaaaggagcaaggctttgaggaggagtccagtctttgtatgggaaagcaaaaagtggagaaatggccaaatgtagttaagtgacattggacccagaaactctgagttggggaacagatatcttgaattcggggtcttgtgcaggaggaagaaagtggcccttggtggaggccaggggggatgagtccttcatgcacatgcatctccttgtctctgtgggtgaggggatctttttttttaattattattatactttaagttttagggttcaaccattgtggaagtcagtgtggcgattcctcagggatctagaactagaaataccatttgacccagccatcccattactgggtatatacccaaaggactacaaatcatgctgctataaagacacatgcacatgtatgtttattgtggcattattcacaatagcaaagacttggaaccaacccaaatgtccaacaatgatagactgggtgaggggatctttgcttgggaattgcatgcctggtgttgagaaagaggagagcgtctgagagccctgggtcttagggctggcacacacctttctgctcccttctctctaattgagcattagagactccgccccctgctgggagttagaactttagctgtgttttcccatgtgaaggagcaaagaggcaaagcttcatctctgttggggctagcatcaactaattcaggtattccccatttacacattggacatctacttgctgcaaaggcatggtgacaagtccttgtgtgggaggctggcagccagtaggaaaatgttccatttgttttttcccaaatttccccacaaaggaggggatgctggacagcatgaaattcttagttcatgacagattcccttccattcattcaggaactatttcctgactcattgtcatagactcagagatgggaactctaaggatcatttagaaaatctgaaagagagggactagtgacttcccctctctgcgacttgttaagatattagggcagggcatttctctcatgtatctctatcatgaggactgtgggagcctcaaccccaccccctgcagtgggtggggagggtgtggtctactggggtaacaacatttgtttcacaccttaaatactaccttacagactcattacagttttatatattactctacaatatacccaatttgagtttaatacaataataatgatatatatttttgaccatatagcaatgttggtgttcgacaatgattctctgtattgtcctggggcttctagcacctcctggaacatcgctagatggtcaggagcaccaaagttttaaaaacctgatgctctgctgtggtaccatatggtcctgtgtaaagcagggtcctaagtcctgagtctctaggaaatactgctcagtgagcactgactctatactagatgtgaagccgggggtagcacaggatatcttatctaagcctcccaacagcccaatacacctagcactctctttaactccattttctagataaagagatcgagacttgtggagatggcatgacttgccccaggatccagtggtggagttgggatttccgcattatctaacatcctcccatgttagactccaatgcttatgctccttcaattcattatgtgtctggaggactttggaagctatacgtggctctcccacactacctgtcccctgtggccagcataagtgaactcttgcatgggtggcttctctctccatccccggcaggctgtggactcttggctgccctgccctggcctgtctctccccaggtttggccaggtttggccacagatatcagagatgccaaccaagttatttgtaactaaaataaatcacatcccttatcagagtccagctgccctcccagatatgctctgatttacaggcttggaataaagagagaggtggttgcttgtctacaggacaagttagggcaatgccctctgcctgaatattaggaaagcagcattacaggagctctcactctgaccaggcaagcatttcacatgcacagacccagagacccactcctcacatgctcattagtaggttgtgcgaccctgggtaggaggctgacatgggtcttgaactgaaacccagtgtgtggctctaggtgacatgtggccacccaagtgaggtttcggatccacctgcagtgtcagatgcttcaaggctggggtcccctgatggagaggaggtggttggagatcacctgggcctcctcagcactgcctcctggctggggctggggctggggataagagagtaactgcaattgtgcttccccggcaccttcgctttaggtcactccaccgaagagcctgaaagggaagtggttcttgcgaaagaatgagctgaagcaggtggcagatgctaccaggcaccgtgtagttttcaaaggggatctttttctgcctcagagagaaattctggggtttgcacagcaagaaaccgatgactcaatttcctttgtgtccctgctttaatgggaaggttgtaggcgttctttagaatggcagggtaggttgataccttctaccttaaatttgaatcccacttttcactcacttagcaggttgaattttttttaagtgtaccccccacagctgcccaactgggtttgcgaggcaagcccaacttgccagagtaaaccggaaggggtgctttctaaagtttgtggttctggagtctggccaggcatggatacagtcattgtgcgttccagattttctgggagagtcaggatctcaaatatgcaaacactctaccaattgatgtctagtgcatattttgactaaatgtttatatatttttccacaaataaatacatgacttaatgtaattgaaagtcaaacactttttaaaaatgctttttgcataaagaaattcacatctttacaactccttaactaggatggtgtcaattaaattaatgtttgattcaggacatgtgtactttggaggtaagtatttcatattcctcccctctccattgctcaattgccccactgggtgacgtaccaagataagccacatgtttgattcttgtttgctggatgtggacatatgcacattgcaggtatgcctataagtacatgcctgaaggatctatgtgtgtggtgggaattggtgatgccaaagaatgctaaagactttcatgccccttaaaggggaaaataaccacaacaaaacaaattccaatgtatcttctcctgtcttctgcagcactgggggagtcccctgataacagggatcatgtcacattcatttttgtgggcccagatcccagtaatattgacccataactgttgaactgcaatgaatgtctagaatataaaagtcatgatatctatatatatggaagcatgctgtcagtatgggctaaggtgcaaatacatttatgtgtaagtgagaaccatggtgatggctgtgttgctcaggacagggctgacttggctggctgactgcccaccacaggcctcatgtttggtctaccccaaacagtgagctcacccatctgtttgtttgcggctttggtggctgcctgctgtgaccgctggggacatctggctaaagacagggttactagatagttgggctgagaagggagtgggagccagtgagatgaggacaccaaccccaaatttaagcctcaaaacaaaaacactccccagcagcagccaccttggggttctagttattttggagatactgatacgaggttgagatccttgggtgagaggcccacactcctccaacccccatgtctgcttctggaaggtggtggcagaggagagaagtagaagtactatatgggagatgcgggagattcttgccttctctgtcggtctctttgggcaattatcaagctgtcatctgaccagatactaccatagcttcttcgggggcaaatccgtagggaatcctgacatccgacggggagccactttggcaatggcaaacggtgtctcctctccacagagcttgtgatgtcagaaattacccataactggggcaggttttgtcttcccaaagattgtctgcccagctagacctgagagacagggagacaaacacagaatgagggggtgggtcttgtgggggtggggaacgatggaaactcacagagccagatctccccgagtttgagttgcactggctgcctgggtgtgtcctcctgaggtaagtgtccctgcgaagtgcaagtgtgggcagacagatctcaggtgggtggggagggactgagtcaccaaggaggtgatttgcaaaactcaggtcccagaaactttcaggtcttcagcttttaaaagtaaaggttaattgcaaaactccggggttgagggaagagattattcacatagaccagtcattttgagcatctgctgttgtggcattgcaagtctccttcgcagtgcctgaaagttcatttgtttttgagagctcttacgctttttctgtttgcatctttgcacaagttctatgtttctgagaaccctcaccactattagtaataatagcaaacacttacagagtgttgaccatgtaccagcgccattctaattgtttcctatatactgccttgtttaatccaaacactgacttcatgaaggtggtgctgttattatctgtcttttacatatgaggaaactgaggcacagagaatttaagtagcttgcccaaggccatgcagctgataagtgatggcgctgggattcaaactcacatctggctacagagttcatgctctttgtcactatgttagagtgcttctcttggtatattaagatatcgaggcaccctagaaatccagacgattgtacctggaagtactgtagttgttttcaaaaacttcatttgggaatctagttgtgggtgaggtcataacatccactgagcttttaaacatgatgtcagaggaaggggttagaattgcaaaaatgaaggaggaggaagttgtaatggaaacttctgccaatgcatattctgagttgactcattcattctgatctctgaatagaagctctactctcttctatgtgatggaaagttgaggatagggtagggctgagagggatgtgaattgagttgtttgttcattaggataggatagggctgaaagggatgtgaattgagttgtttgttcattatcacttcattatttgtcacctggatgaaaggtaaaggtggctgattagtgtttctccatcagctagaactttgactgggaaatgagccaatcaaatagcagcaaaatatttgccctcaccttacaggcccttggttccagggtcttctctccaccggctagaatggatgagggagggagagaaactctgagaaaagaggctgtcaggagtagggctgtacatatccagggcacaaggaatttggcaaaagctggaagtatactatagcccttctctccagccctagcctaaaccagatgaccaggcttctatttggcccagcatgtgaccatcccatcagggagcaagagagtttcctctgggtacccctcactgagaaaaaagccacccaggaagggaggaggcaaggccccctgggaacatctggctcagtccacaggaagggatgcaggccttttcctgggaatgaggactcatcccatattccagcccccttcccccaacttttttttttttcaattttagtgcatctctttacacttaacaggtctgcagtgacttctaggaggatccacacaccaatcgtggaactaggcagcatctttttccacttcctttccaagatagtagcacgataacagtaaagcccctttgcaagtgttcactattatgcacattaagatgccagggagagggctgggaaaggtggctcacacctgtaatcccagcactttgggaggccgaggcaggcggatgacctgaggtcgggagttcgagaccagcctgaccaacatggagaaaccccgtctctactaaaaatacaaaaaaattagccgggcatggtggtgcatgcctgtaatctcagctacttgggaggctgaggcaggagaatcacttgaacccgggaggcagaggttgcagtgagccaagatcacgccattgcactccagcctgggcaacaagagcgaaactcggtctcaaaaaaaaaaaaggtgccagggagaaatgaacaattccatgcagccaacacctggtctcctgcgtttggcttagaagggcatttctgcccaagcccccagctctagtctttgcacactttaaatgagtagctactacatgccaatcacagatgttgcctctgctgagtatccagtcaaaaaaccagaatctaacagagctaactaagcaccatcttgcaggaaaccagctgacgtcagctccgcagccaccagtgagttactgggcccacatctgcctgcaagagggggaggggaattcaggtaacccacaagaggggataaaagttcggggaagaaatctcctgtcaaggagtttgtttttgcagtggatcctctgcagtgagactagttgtctttacaatatcattagaggtcaggtacattcctgtagactcccttaagtgacttgctttctcctattgttccccctgaaaattcataaaaacctcacaaacacatctccatttaaaaagagaaagtttaaaggatgccatgtaatggttatctcttttcttttgccagtgagcataaaagctccttagggaaaagcccaaaccctctatacattttcatattcatgatagccctgagcggtcagcacagttccccaattatagtgggtgctcaataaacacttggatggcttactgaattaataatgtttctagacttggctagcaaagccatctccgttacttatcttttgtgatttttataggttctgtctaattctttttcttcattttttttctttctggtctatacaaatcttctttcatttttctctattgctacttgtagcgatcctcaacccgcctcctcccttgaaatttctgttctctgcactctcttcagtctaaagagatctttcttgaggtttgaaatgttacacaaggcaggggaagtttagagctaattgtattttgtccagtagaacggggatctggatttcctataggtctggctgcctctttgtctacacctttacttccaaatctggcctcatgtataaaaagaccccaaaccttaaaatcatgttctcaacaatactcagagaaaaattgttggctttttggtcaccatgctagaggaataaaagggcagttgtttctttcggtcaatggtttgaaaacctcccagactaaaaatcacctccatataatcagatgcttggtgtggtgtaatgaagatgaggaggtctggctttgataagagtcatttagaaggtataaaggcagtggaacaagacgggaggacccatacaccagttgattcccctcttgccacttaacagcagcgtgagcttgggcagttgcacttgttaaatgtctggaacaatacttagcacgtaatttctaaagcttaatgtttagttcacagaaggtatcccaagaatagaaatgattattatattttagcttctctctattactgattcactatgtgctgctaggcaaagtatttcacccccatttacttctatttttccatgtgtaaaatgcgagggttggattctagttgatctgtcaagtcctttccaggcctcatgttctataaattcaccactctgtgggcttactaacacctgagcctcataaaacctaatggaaagaataacacaaaaccaccataaggcagtgtcaaaaaaaattgatgcctgatttgtattaaatgtcaaaagtgaattattaatccatgccagaaataaacatatggacccaattacactctaactccaatgggcaagagtgttgtagggacaaagtgctttgcccgtagtacttcatagaatcctctagaccatgtggaaggtgagcagatgaagcagctctggccagagaagttaggaacatgtcccagtcacacaactgaaactgcaggaagtcagtcctgggattaactgcaggatctgaacactgtactctttatattgtactttaaaaacattgcttcacatggccagaaaagccaacctctgaagaagagaaaaattgttcccttcactctcagagcttcatgagcaccttggacttgccagctttcctcaagcaacccctgtaacttgttggcacaaaattaaccacaatattcagacaaagcagtacttacagggtgagtgctagtatcctatgcaactagggtagcctgagaatctaggggaaaaaaagctagaccaaacaaaagattatatataatctttccccaaatcaaggcactgagcaaggcaggcctgagagatggtgaatttctgcttctactgagagtcctccagacccccagtaaaaatttcttttcatcataaaaccagagaaactcttgctcaggaaaaagaaagaaaaatggaaatcataaagattgcacgacttaggattttgtcaaaatgtgtcagaggctataatataaggctagtttttggcattctgtcagtcactgaatgtccttcgtcagatcacagctccttttggttgtgctgactttatacccatctggaatccactgaccattagctgaaataaaatcccagatgtgctcagatctcacatcctgtgcaatgccctcagttattgctgatacggttcagtcatctgtctctccagctaatcatacagacacagtattctaggagaagtgagaacccactcatagccaggagagcttctccctctcagtcacagggtgactgtgggcaaggtccttcccctgttggttgcctctgtctccccagttataagatggtgacaaactgaccaacttaaaatttccttaaaatgtattggcactgtggacagaaatgaggaaagtggaagacctagtttctgtcctcagggagcttaccatttggtggaaataaagttaaacaggtgaaagaattatgcaagagagcataaccaagtgtcagaagacaggaaaaacagacatctcgattgcatgtgaaggcttcaaggaatttgaggatgagttgaatgtggaaaagaagatagacagagagaggggagaggagagaaacccagggaaaggcaaaacatgagccaggtgtttaaagtgggggaataagaatggcttgattggggccaggggaggggtctgtctgcttggataagagaattcatgaaaagaacagtgagagatgaggtcggacagattccaggcaatcaagtaacagtggcactgtccactggcagaagatccaatttttctgccccagaaactcagaagttctcatgaatcaccctctcagacagtgctagacagagttcagaagcaggccagctccaacagtgagaaagaactttggcaactttgcctgggttagagagtggcaatttaagtgaatcccaaacaagacctactgtggcaatagcaaatagattttagctcaaggaacatttcccattgactcctagaggcttcccaaaatgctgtactaagaagtcaaaccttggctcaggtatggagagtgctgtgatccattagtgatgtctgctatgggcacaatatgaaggatttgacccccatgcatcacatggacatcaccgtagtggagcagcaggctttctttgttaatgtttctgagagttgtgtgtatagtcctctgggagtttagccattctagaatctgtccagctagccatactatagactctatctccttctagaacagtaaaaaagcagtctcttgcccagagggcagaggttagtcacttgagccttttgttaggattcactcccattctgtcttcccatttacccacatgaagttagatgctgggagccagatatttcctgtgtttgaacaagggccagacttcctggcaaagggtcccttcttcccatcagtttcttcaactgcaaactgagaagacaaaagtgatgcctcacccgtggtggcgacaggaggaataactagctaatgcgaggaaagcttttgaagatgaaagggtggtatgtgcatgttaattacaacttttatcagccctggagcctctgcattctcagctgccactggaagctcttctgtgcctcccaaatgcaaacagcagccacattccatgagctggcctcactaagtcctgcttagagcatccaagtcaagaaggttggattttgagctcaggctggccagctggctcactctgggccactcaagtttcccactactcatccccaagggaaaaagtaggctagctacctgggcaggtaagataagatagaaccaaggtataaacaaaaggctccatcaaaagtctaccagaaatagcccctgggtaagattaggacactctgctctaattcccaccctgtgaaagcctaattgtttgaccttgggctattggctttatctgtctaatggttcaatatactgtgtgaaccatttggggataataatccctctgcctcccctagacctctccacctttgcctgctggtgtgaaagtgttttgtgctagtaggcagaaacacgtgatataaaactacaaggtcctattattacctaggataactttcgcctctatctatgtctcctgttgctggttgaccccaatcattgaaactgtattctttggaatgctcagcagtctcctccaagctgccattccctccttatctaggtgggcccagtattggctcaggcttcttggttgtgccacttcctaaggcttgcaaatgcattcagcctgcccttgctctcagtgccagctctcagtgcccttgctgggataactcaataaagggctagaggtgggaatgggataatcatcagatgctttgctagtgctgacgggacagcttagaaggtataaactgagctgggcccatgcagcaacaccaaaatatgtgttcaaagagggagaagaggagaaaaagagaaaggaagttatcgtggtctgataacagggcatgtcagaatgggaaagggtgttaggaattatgtagccaacttgtttgattggaaagataaggaagcctcaagggctgcaagtgactttcccaaggtcacaaaactaattggtggcaaaaccgtggtcttctgacttgtccggtttcctttcattttatcctttgagacgataaaggagaggacactaactaaacaagaagacaatgatctgatcaggacaagaagacttggagtacaaaatgagaagaagataatagggtaatggattttttagtggcacagtgggaaatggcgtaggtgtttacactgcactggagccctcactgtgcttggaactggttccctgtgcacagtcttgcacacccatatttggtatttttttatcctttttgacttaatgagcatttggaaaccataaggcccacagcaacctgacctttgacttgcccagactctctgagcaattttgtgagttgagtcaacaatcaatggttttcaaattattcaattgttcactcaacgcatactagttgaacaccaatatctgtgctctgctaggcactggggataccactgtagacaagagaggcatagtctcctctctcctggaacttacagtctatctggaagacagacagtaaacaactaatgatgcctttgtttaattacacttgtggtaagtgctatgaaggagaagcactggatcttgtgagagcataatagggagatctcatctgatttaaagcaccagggaaagcctcccaggacctgttggatgaatagcagtaaccatgtctccaggatccccacaattccttgaggacccttgttgtcagacttctcagagctgtaccagccctctcactgtctcaccattgggtcttctgagtaagaaagcaagaaaaaaaattttactcctcaaaattctgaaagcaagtggtttatcatgtctgccctgtaatagtggtgggaagaaaatcatgagaacctctaagctgactcaggattttagaagcacacatttggggagaagggaaacaaaaattctggagaagcaaaaagtgtcatatggtatagaagttattttaagctactggggaaaattcataatttacttagggatcttgagtgtcaagcattggtttagagacaaatcttatccatttcgttgaaagttccttgatcttgtggctgaagcttgggcctagggttttattagtgtacatttaggggatggtttacagggtgtctttcaaggtcatacaggtgcctcttttggggtcaggcaggaggaataggacaaactctgggatacgaatgtacaaccatttggctcctagggcctcagtcctttagctccttgcttctggtgacttcttggagacaagagtagactttttcagaacagcgagatagttgtgctgacaaaacaaaaacaaaaacatcatttaagatgccttcagatgcaagtacatgtcataatagaaatatttaaaaattagtagagtataggcactagctaattcaaatgcttggttgtaaacaactatgtcttgtaaatgagaataaagtttattctctcaatgacgatgataacatctttctcactcacttttactcaaattggctttattgggcaggagagacagagatggagttataggtatcatgattgaacttaagctacaacccatctatgcatcaaaccatcatgtgtctcgtgtgattgttatctgttgtgtatattttggtatatccctatctgtacataccagctgaatatttctgtaagtaacagaacaatcagctctcataaaatattacctcccagggcaagaagtctgggatgattccaggaagtcaatgatattatcaagactcaggtttatttttccaactttcaattctgccactcccagtgtcttcctgcaatttagcacccctcatgttcctaaactaaatcccacagttccaggcatcctaggaaaaaaaaaatcaatatttagcagcagaagaaagagtgtatattcacaaacatctcttctaaaattggaggagcggctttttgggaagtccttaattgacctctccttatttctcattggatgaatggggtcacatgcccacacctaaccaatcactggcaagaagagcttggaccacagtgcttgacttagaccaatcatgatccacccactggagctgggatttgaggtctcacctgtcctgaagcacaaattcagggtttctgaataaaattgcacttcaggtagaatagaataactttttttgcattggtaacaatgtgggctacaatgagtaagggagtccatttacctgctagagttgtggtttgagactatttgggctaaggaaagaaggcaaagctaagtttttgtgcctctgtgccacaccctcaacctttttctgaaaagacatgcctcatgggtagagctcacatgggggacacactgcagtttgaggtttagatggtctgtggcttatactcaatgataatacctaaaactttatcctttcctgtcttctacaaaagagaattatatcagggaataatcttaaatctgttataatttacaagaaatagccagtcttctgcacacttgagtactttattattagaaactcattacttgcaacccatctcagcactgttggagctacaccatgcatgaggaccgctgctctagagtcatccattaaaaaagaattcctacgaacctgaatgagcatttctttctctaaattatgagatgatgaccctcaagggaaatggccgtcttcccttttctactgcactcttagagtgcattaatgtgtgtgaagtgttttcggttccattatctaaagcagccctcatattaacatcgtggttggcattactggcctcctgtatgggatgaaagtttaatgacttctgcaaggttatgaaaggtcaagatcacagctaattagtgcaaattcaggatttgaattctagtttctaccccagagctgatgtccatgtcaccatggacatcatttgctcccaatatacctgatttactttcaaggggtctggaattgactattggattttatattaaaaattgctctttcataggcaggaaaaagtccttcctaatagtttgagtccaaagcttaagggtctagcatctcaactttttaatgaacccaaaaatgaacaggagggttttctgagccagtcccctgcctccacacagttagctcatgaatccaacatcatgggaggaagtcttcaggattttgtttcccattccttttttatcacctaaatatagttaaaggatttgtgatgactgcatccagagatgtttaaaaatggacctgaaggatgtgattgtgtcttaggcaggaagggtgccggttcttttcagtatctaatgatgaacgatctaaaggaaatggattctaaaccatttgattctaaaccaaaatggtgtatgtttcttttgagggtgaatttcctgatcatgagccttgttgagcattagactggccggctggttcctaatccatccttcagttctcagctgcagtgacatttccttagagagacagatctcctttggggacagcacaggacttgagaaaaaaggcttccctttccactgagcttggctccaactacacctcatgtgtctgttacatttatcatgctgtgttgtcaacttgtttaatgtctgtcagtggctcatgcctgtaattcagcactttgggagcctgaggcaaaagacttactttgacagcagaggtttgcagaggttgctgggcaacatagtgagaccctgtctctacaaaaatatatttttaattggctgtgcatggtggcatgcacctgtagtcccagctgctcaggaggctgaggtgggaggagtgcttgggcccaggagtttgaggttacactgagctaagattgtgctactgcactccagcctgggtgatggagccagaccctgtctctattaaaaattaggaaaagaaatagcctgtctactctattggtccataacctctatcgagacagtgaccttgtctgctttattcaatgcctggatcttttcctagcacagtgcccagcacatggagacactgaatttggattctcctttttgaagtccccatatccacttcagtattggggtgattttgatgggattgtgacttaccatggtggatgcatcctgtgagttccaaactcaacttcttaaaaaaccttgtctatcatctatccatctatctgtctgtctgtctatctatctatctatctatctatctatctatctatctatctatcatctgtctgtattctatgttccatctatcatctatctgtcatatatctatctctatctattaattatctctatctttatctatttatatctatcatctatctgccatatatctatctctatctcttaattgtctctatctttatctatttatatctatcatctatctatatctatcatcttttaacctatctgtttctattggaataagagacaagtgcttgaaaagcagaggagagtcaatacacaggccacatcttctctcactccctccttcctcctcatagctgtgagccaccccagtccctgtacctgcttccttggctggcatcatctaagaaatcatctcttccacagtttcctgcaagggcatcaccccaagggaagctgaacacatgcaacatctgcccactcaggataagtgtgagggataaggaggaaacatttttcctctagagacaggactgttggggcaagggctggggaagcaagacatggatactccaggctacttcttgctggggctgaggggagtgctcggtgtggctcccctctgggacgtgtttagggcagctctctcgcctctgaaacaagcctcatcagatcatccccaggcttccttccgcatagtttctgatgatataggaaaggagcccgattatctgtttgagcttcctgttctttgtattgtttggaaggctaaagtcaacagccacttttgtattctgcattgtttgcgttgttaaaaactctggaaaactcatctggtttcttctccaaaagtagcttcccagagccctgggagacactcagaaataagatccttttcaaataggccagcagggaccagggtctctcagaaccagctttcctatcttcttccaaaggccggaattgagaaggtttactccagcccacataattgagtctctgggctgtcaaggacgcattggggagtttgcttctggtgtgctgggtgcttagaaagccgtatgaattgcagagatagagttgggttccagttctgccagtcaccaattatgtggccttaagcagtttacttaacttttctgagcctcaattttctcttctctaaaatagagttgtaatatacctatggcttagagttgtgtaaggactgacgcgatcacagacttgaaacccttgatagaacgactggcatggagtaagcattcaacagtcataattaaggtcattgtgatgattacacttggggcctctccattcaccatttgccccaactgtgttcctgctgcacttgaaaatgattccagctgcctctggaagattttcatcccatttctgggaaaaacattagccaataaactctcattgaatttggcagggcgggcacaccagcaagctgacactatgtgcatacaggcttcctggaacaactgttgctgagcaaatgaagcagcatggaatgttccgggaagcaggattattgctgtagctggtgaaagtgaactgggaaacgcactccaggtcctgtctttacttgcacaattacagtcaatccccaaggctgcttgtctcagcaggatcagcctcttcctgccttctgtcctggcagtgggtggtggggctggaggaagaaatggtgttttcctccctctcccattgcaattgtttccttacagtgctgttctctgaggccagagaacagaagggctctttccagaggcagtttaacagagtagcttccttttcattctgagaagtttggagtttcccagagtccacttcctccctagaagcgcaagcttggaatttcttggttgccaatgaggtgccagcttctgagtgcataaagtgtgtccatcgtttttaatcaattctctcatctccaaaaatacctttaattgcctttagctgcttagttctgctgtcctctaaagaaaacaagatctggccactcccagccacacctcagaagtgagtaaggcttttgcaccttttaataggagtatttacatgtgtgtcggtttctcatctgcttttaatttcattagagtgtgattttggactgttgtttgagatgaaagagcagattatcaaagtgcagatgattttttcatggtgcaaacacatcataaattagaaactatgagacccctttgcagcggggaagactggggccagtcatccaaggtttcatcttcctgtaggagaagggaaaaaaaacggacatttattaactatctgttatgatccagactctctactggtgctttttgtatatttattctctaactcccatcaacttctctttgagagaggcagcaaatgacaactgaataaatgaatggctgaatttcatcagagccagtttacaggcagagaaactgaggctcataaagcggacgtaacctgcctgagatgtctcagcttttatatggtggggctggaattcaattcagagctccttctcccttttaacactacactgcaagttcccattcagcttcatgggattaatcctgttcttctgtccctagaatggagccttgaaagttcaaggtgtctccttttcctaagaaactggatttttctggctccttgagaattgaggagctcaaaacaattgagaactcttgggaggcatcttcaggaaaggaggtggtggaaactttcctctcctcactctccccaggggcaatggggcctccaaggccaccaaagatcaaggtgccaggtgggggatgcctcccagcttcccattcatttttcagttgggggccactcagcagctcctcaggtgaggattgtctcagaactgaagaatggttcaaattggcccaagatgctgaaatttattgcagggatcactgggacagtgtgtagcaatttaggaggcttctctctaagggaatcagtagctgctgcatttctcttaattgaaaccactctttccctccagcttcgatggggcaggttctcatatctgcgtgctgaaaggcgtttatttggtgtattctgagagcaggatgctggtaacactttcttttgtgttttgccaattgtttctttttactggctagtccaccctgtctgacgcattcattataccataaccaccttgacaccagagtgaaatgccatttctctgcaggtaggagagagtcacacggattccttgagtgtttgtagcgtaagtgagaaagatatgtagccttcttctagaggcagagggatgggttggctgggacttagagatattcaaatccaactctgttcttgtctgataaagtaaacgaggcctctgaaggtaaagtgacttctgtaagtactcacagcttatcagtaagaagcctgatattaaaactccaggtcactagaccttcaacctaatgttcttcccactaaaccaagttaacatttattgtacaccatactaaatggcagacactggggacacaaagatgaataaggcatggtcccagtggaacccactttggttatatgggttaggacacttgaggcaggatcctccttagaatggtgttttataaagtctctctttctctttctctctctctcatctctctccaatctatcctctctatcaagagagaacacatgtaatgtagagtgagagcccatgtattggataattaggcttctggctcctaattatcaggaagcctggaggtcttgagtggttgtaaccaaggatactgaaagtggttgaccagttaataaagaattaagttagagtaagaggcactttacttttaagctgcctttaatacactttaatctttgagatgattggctaatatctgttaagtaccaggctctttgcagagagtcaggtcctttgctaaatgatttaggtatatttcttcatctaatactcaaaaagcaccccataaggaaggcattacttttattttactgatgaagagactgaggcttaaaggttaagaaaacatagcatgcataacatcccacaagagctcaagccaggacttggacccaagtctttcttggatctttccgatccaagccatatggttactgcaatctcacaatacaatgagggtaaatccttgcaatcaccagttaccagcaattgtgaagcaatggatggcatagatgtcagggggtcaggagagccttgcaagcgttcagagggcttgggagtggacacatcacagttgcactctgctgggcagcgctgtaagtctctgattggattttgccttgaattttttctggtcaagactcagaaaggatggatgtagcttcacttacaccaattctacccagcttgtgacccaaatggaactcttatcccttaagccaggtcattcagttgttgtagcctttgccttccaagtttcccttgtctaccctactgagtctgaattctaaggacatcttcttatggactgtgggaggcaaagatgaattccaaatcttatttaatctgtgtgctgggggggaagaggagtgtatttccttttgccaggtatctgagcctacaaaaagccccataaataagtaaaatgtgtccatgagttcataaaagagtgagccttagacatacagaccacctgtcaaaagagccctgtcattctctattatattatcctcttttattttctgtgtaacactatgagtatctgaaattaccgtattcatgtattaatcatttacctgtatactatatcctcactctagaggtaagctctttgagggcacagatcgtgtctgactccccagcccccaagattgtatctggcttgtatcaaccatatcatagggaaggtgctgtgaattgacaccttgcaccatgctttatggaaactaatggtgctttaagaggcacagatttcatagaaagagacccagttgttcccaccctgatggttctaggtctaggtctaggtcaccaatgtctatggtgaaagaatgggcttttgcgaggtatggtctcctgtcatgtatgagggtcatttatttaagggaaaaccaagaccttattttctttgacaactgcacacaagggtcatttgtaatgtccttcatttccaagcctctggatctttgcatggatcatgctccttaaaagaaggaagttatgtttggcctgcttcagctaagcatggaatggtaaagattttggtccaaaccctgtgacttgagttggatttaaaagcttgtcagaaatgagttctctggagcttggcatttgagactggcatccgttgttccagatgagatttcacggattgaaagctcaggaagaggtgtgaattacaagcaattagttcacagggcagttggaactgtagtaatcctggaaaccttttggcccacattttaaaaatatccccacaatccagcttctccctctgtagggcttctgcttgggaaagtttgtgtaactccccaaaacatctgaagagtgaatagcagtagtgttcttggactgcgaaggagaccctgcttcttatgtgcatgctcttgtgcacacagacagaaacacacacatacatgcacacacacacagacatgtacacccatgttcgctttagcatctgatagaaaaagaggaacatgaggaaagacagagattgagtcaccaacatgtgacctggtgatttctgagtcctctgactttgaaatcagtggaaatttagagctctactttgtcacttgtaatgctttgttgttgcaaataaatatttttgcagctgcatcacttcattgctaatatatttgaagaaggcaagataacctaaaggcatgaatcttgttctgttttaatccacctgtaagtcagtggtggttgtaaggtaaattgtaagtaagagctattggccaccaagtgccaagggttatgaatgatttacctttttttttttttctaaactgaaggaaactcatggttgttcctagaaaaacatgcacactcacttgcttgcattcggataagcttctttgagtaacagggaagaggccactaggattacaaggcagttagtgcccattggagtgtgactggcattgtgcaccctgtgaatcatagtggtggtatggggaaaggggtaaaaaagcatcaatctatggagtatgcgaaccagatggcatctgtcctgggaagaacaaatatccttcataggagaattagaggactatactagtcaggcagaaatccagtccattcatcaagcttttcctcttgctgtggtccctacagggtcagccctgtttaggctcaagcctcttaaatcccagtgcaagaccaatttctctatgaaattctccctgtcttctttggtctcatggctacttcctgggaggaaaaagtagtaatcagctccctccccccagctaaatgtgcatggtgttagcaaattctaacccaagatgttaaaactatctgagaagaggcatgattctgcttcttgtctgtaccctcctaaagtcaaggtgcagcaaggagagagacatttgcatgtggcccctgagaaagaagagatttgtctgcctcaccccctgctggtgcaaacttgcacctctctcagcctcagttttcttatgtgtatcaagtttcaatgatcgcaatagtacttatctcatgtgactactgtgggattgaaacgagatagttcatgtgaagtaccgagcacagagcctggcacacagtaggtactctattagtgttaatatcactggaaaacccagctgggggctcagcagtagaagctgccagagccttagtgttacagccacatccattaccccaccattcacatacatttcatgccccagggtgagaatccacatatcccaagcagagaggcacagctttggtaaactgagtcttagctaactcatgtcagaaaccaagtgttatcctggggtttgactcctggctcttgccacattcatagcaggatgctgagtggattgtactcagcctcacttgttgcatctgtgaaatgggggtgattttttgacttctcaaggtatagcatctattaaggcacatagactacaatctgacacaaattagcagctccatacattgcagaatcttttctttttcacttaaggagatgctaaaagaggcaagaggaaagaaaatcaaatttggagatgccgtgggctgtgtgttgaagttgggctctggtggaattggtggtgaccttttgcttctctccatctggatggctgtatcttcaaagacaacaagtcttaactgcagtttttgattgtataaatctggccaagtccactatttacccagcccagtctccttagagtaggattggaaactcaaactttgctatctcctctgcagagtgagcaagggacaatctttatgaaaaactttaagttgcaagatatttgtgttcttaataatgaagggaagaatacaaaaatgataatactaagcctggctcatggatagcatttttgcacaatatatttcatttgggctgcagcctttgagctgtactaattgctctgagcatctgtttgtatgtccgttgcatgggatgatttaccctcctaggtttccaaatgctttggagcccctggtttattgcaggacttactaagtggtggccatcgtcactttgattggcccctaccacagtattttccagacttttccaccaaggctcttagggctttgtggtgggtgccagaacaattgatggggtagggtgggtgctggaagagaatgagcatctggtagattgagtctctgggtctgcccttccaccctcactccagcccccattagctcagcttgattttcaaccacttgaaatactgtggttgtgcctaagacatcatgtcagggagagaaagaaacatctgaaaaccatcaatcttctctctgaatgcttccactggtcccatttgcctgttgacaacccaagttgaaaaggcagcaccagaggggaatggggaaaattagcagaactggaaaatctgagttgagatctgggtttaccaaactctccgtaagactttgagtctgtgaaacttatgtccattagtttcttcaccttttaaatgggtctgtagtacctaccctctgggcctcacaggctgcttttgggtgtgaaagtgctttataattggtgaaggaaactgctacgtggcaagaatagcaaagcctgatgtactttaatccattcggttctgctgagggtggagccccaatgtgtcttaattcatatgaggtttctgagaagctttttgagattttaatactgtcccaggtatgcacatcaaccttctcacttttatcccccaagctccaaaatttcataactttttatttcatcttgggtggcaggaaggcaaggtgtgcctgggggagctacagggagttattcaaggtcacataattagcttataattaacagagtttaggctagaaccagtgcatcccactcccagatgggggcccccggcttatctcagcatgtcagcaacccatgaatcagccctgaaatatagatattacctatgagtaacagtttctcatcctacctcaactgttacgaaagtcttccctcaaactaaagctaagcagttccacaaaatgccagctatagacattagcagaaactgtatattgattaggtgatgtatcagtcattgtaactacccagaaaaaaaaatacaatgacaaaaccaagtggcccaaccttattttctacttgcaagaggaaaaaccctatttgggccccaagatgcttttttcatttcatttaccacatcctgggtttgtgctagtcaatctgctaaatcaataagatccgaaaaagcagaaaacaaagatcgtgaggccagaggatttcctgatcaccatggcaacacacaggggtgggtactgtggtttctctgcctgaagacgcactcgtcaaagactacttggtgttacagaattctggtgcagtgaagcaacagttctgggacatatactttcttttgccagaaagactctgttggatccaggaccaggagtggggggttaaacagttctccataccctcacctccaagtccccatcatcccattaggagacagggacagtactgttctccaaactctcaaaacaacccaagagctttctaggctgtgcattgggttgatcatttggtggccttggctgaagggccagggtaacagctaggagaacccttgggattcttctccaatgtgacaggcccctccatgttggttcagcgttgactgccatgacaggctccaggctccacggaaaaaaggcagagaaatcagggggtccagccaggcgccaagacgttggggtgccttgcatttctaagtgccaagtgatgaatagctcagttgaaagcaacccagggcacattctggaggaaattctctgggtatgattgtgcatgactgttttctctgctcattaaaccctcatctgcctccagggcaattccgggagagactgagtcactcaagactcatggtctgcactgggcagccaaaggcgattcggccaccaagtgtgattctggcctcattcagaagtggatgctaaacaatacaccctttcaccaggagcccatcacatgggcatcaggagatgggggcgagtgatgtgccagccttctagactggcaggcctggggggcagcagagggcacaatagctagaaagactcccagatgaaaacttctgggctttgaagccttcgaacaaatgaagaagaaaatgacttcttcgtgtcctattaagacagtgagttgtggcttttttgagagcagcttgctcagacctcttatgaaagatagatcagtagcaagagcactggtgtaggagtcagaaatctgcaattatgaaccactgagttttgtgtgtgtgtgtgtgtgtttttgtttttgttttttgtttgttttgttttgttttttaacttgctggaggaccatactcggctatccttgattttattttctcctgtgtcacaagagaaattggttagaagcttcccattgtgcctcctggctttaaaaatagataatccaattaacaataatgctttaaaacaacaaaaccttgtccttttcccttcctacttctgatcagaaccagctcagtaagatttattagttgtgcaatctgttttggacatgagctcagcaaatcagaggacagaaatagaatcctggctttttaatgataaacactgtaaaaataaaaaatttggagagcttaccagtgcttctggctgcccaagtggtttgtgtgtggttgactcccaggagctcaatcactttgggtgcagtccacccagagagctatgttccagctacatcaacctggagccttagcttggtcagtctagatttttgggtttggctgcagacatctcgtaatgtcacaaggacagcctgtgtccttggtgacccaaccctgggccaaccccaagtcctggagtcctctcctaagagccctgcctaattgtagagagagcattcaggctgtaaagggcaggaggcctgggggctacgactaggtttgggctttctaaattcccaagagtatgatgggaagaccaacaggcagaatcagagagaagcagtcagcccactgctggggaaagccagtcaaggtcaagacttcagaatctcctctctggagagagagtgaaaattccattagtgaagtttgttccactgaagccttaccaggccttggtaaaggcccctatcttgtggtccagaatcaagggacttctgatcttaaaataatattcaataagctcaaattcttctctctagggctctcttttcatgatcacctctccacactttattaaaaaatcacatgaagggtaagtgggcttcctgtcatttcagtgtctgacctgtgcataagttggaatttaacactggaaaatgatcagccagattgcccagtctgaaacccaggtcccccagtgactagcacaagttacttacatcttctcaatgaatcagttacctcttgtgtaaaatggggataataaaaatgcctgccacacaggattgttaggaaaattaagtgaaatattaggtgtaaagtgctgaataccttgaacccagactaggcactcagtgagtgctcactgtggttatggaccaggagctgcaggaattagaacaccattgagtagcaggaactggctttattctcatcttcatgataaagcaacttctccttacatatagcttaatctggaaccaaaaatctaattctgcctcatccctcctgaggagatgacaaatagggatcaggcacacctgggtggctcaagttagaaaacaaattaactcattttgcagaatctggagacgtctggtctggagaactgacagtgccctctctttgggcatagtatgactgtaggttgtctttgggtggtcttcatatggaatgtactgtgtttgccatgttccctaggagatctggcctcagaaatggccctgtgatggtatgtgaacatactgtcctgtaactgagatgatagcttgcacattcagacagacaaagccagttacaaaactaaaagttggtctctgaaacatttgctttcggggaaaacagcaaatgttcacagaagcaaagttctgggttaaagacattttaagtatccaataaggaattctcagcaaacaccagctggtgattcctcagatatgatgtgggaaaggaacctgataggtgatctttttgcaccctataagactgcagcctgtcgggggttgggggcagaaagagagcatttattaattcattatttcattcaacatttgcctaccatgggaggctgtactaggtactgggaatataattgtgaagaagggagacaccatttctgttgtcaacgaagcccacagagaagttccaaaatttcagaatgctggaatttctggttactagagaccttgaagataataatttcttgtaattctttacctggttgtgtcacagactttgaaaaccaatgaaaaccagagatgttgccctacctaaacacacacacacacacacacacacacacatccatacacacaatcttgcatataatctcacaggtccatggatgtattgaccagctcctggattccatattgaaaatcccttgcagcccagctccaatactagtaccaggccactcacctctcaggaaagtttgggaagacgtagataatggcaacttgggtgaaaattacacagtgctctcttcccagcacatgttgtgattttctacaacttcagaaataactggggtggaccaagaagctattattcctcgcaggccctacaatctaggcaaagctttgaaatgtgctcggacaattttatcagagatctattttccttgatctgaggcttagggggcagtatagatgagattaatggcatttgggatcagtgatggtttatccaggagagaatgcatagtacctgtaaccaggagcctgaataggaggcaacatagcatagaggttagaatcctgactttcccacttggatgacattgggcaaaggacttcaccactttgtgcctcagtttcctcatctctaaaatgggtttagcaatagtgcctacctcatagcatttttatgagaattaaattagctgaagtacataaggcacctaataagtgtgcaatgctcattggctctgattattaagtgtcaaacaccatatcaagtgtttgacataccttatttcatgtaatagtcccataaaccctgacaggttcgcattgtcatcccatcaaggaagaggtggagagtcagagaggttaagtaattaacaacctgtgtcacctaaagtgagtggcagggtcaggaattgaaccaggtttgaggaggtcctaactaggttgaactactgaccttcataaaagtttggcactacagaccagctttataggacaaaaaaaccttctttcagagctcctttttctcgccttcctgacagctccctagcagacctcttcccatgtgggtagggagataaggttcctagacactgggacactggtctccatgacccctctgtgctgcccacagccctatagtaatgagcgtgctaaaggcctggtggcatttctaccacgggaagtctcctctccaaatccaaaagtggcctcaaacagtcagtgttttcagttgagctcatttatcgctcagagggaggcacttgggacattttattcattacatgatgcaggagatttattggagaccagagggctcaacggaaaacattcttggtttatttccagccagaaaggcttgtttgagagatgcaatcagccatttagtattagcttcttgaatcaaagtggatcctgaatcacagagttctctgtttctcaggagagacacacagacatctgaggagtcttgcctctctatagtggtttgcagcatggctagcaccattgccagagacactggcactctgtcaagcaatgttctgtggtccatggctattcacatcttaaccttgccttaattctacttcattgtgagtttgggcatgtttctttatttcttcccctctctgtgtgttagtttctccatctggaaaatgaggatactaatattacccacctcataggaatgttttaaggataaaatgagtaaataattctaaagtgcctaaaatagagcctggcatatacacaatgaatgcacaataaatattagccactgctcttgctgttggcattattaatatcctcccgggtaataatttgggtttgcgttagtatcaaggaaacctgatgaaatgtcttcataaattatcagggtttgaatgacacacagccttgaaaatgttggctccttttaagtcaagagggacctagagtagaaggattgtgaacattcacaggatagttgaccagaaatgaagtatttgacaccattcttgcaactcctaagtagctaaatagcgtcagggttaggagttggactttctcatgagatcaagataaatgtaagctgtggaatttttactttgcataggatttcttcatccaatcagcagccctttgcagatacctacaatgtgtcagaacctgcttaagccttcacatctaggaaggctaaaggttgagtttgtctgtttcatcctgtcttggctgatcacatgcacatacaaccacacactcacttgcatacaaacatataagtatgaggagaattcaaaatgttcatggaaaaatgagattaaaagataaaagtttaaagatgtaaactttacttctcaacataagcaccatcacattcaagatactgttataagctatgatagcggccatttagtccatccctaaagaactgagggtcctgggaatttaatcacatcaatgcaatctttcttacattgttaactaaagaaaaatgggtgccctttgaagatttttaaagattaagtaacaaaaaaaaaaaagtcagaaggagtcaaatttggactataaggtggatgcctaatggcttctccatagaaattctcaaaaaaattgcctttgtttgatgagaataatgagcaggagcattgtcatgtcatgatggaggaagactctctggtgaagcttttcgatacattttttcttcaaaagcttgggctacctttctgaaaacactctcataattagcagatgttatcgttctttgaccttccagaaagttaacaaacaaaatgccttgagcatctcagacaacggctgccatgaccttggctctacactggtccacctgctttgacttgtccacttttgctttgactggaccacttccacctcttggtagctattcctttgattgtgctttgtcttcaggatcacacacataaggccatgtttcatctcctgttataattctcaaagaaatgcttcaggatcttgatcccacttgtttaaaatttccattgaaagctcagctcttggttgcagctgatctgggcacaatggttttggcaaccactgagtggaaagtttgctcaactttaatttttcagtcagatttgtgtaagctgaaccagttgagatgtctatgatgctggccattgtttctgctgttaatcattggtcctcttcatttaagtcacaaataagattaatttttttctcccaaattgatgtggatggcatatcgctgcaggcttcatcttcaacatcatcttgtcccttcttcaaacaagttatctgtttgtaagctgctgatttctttgggacattgtcctgatgaacttttcataaagcatcaatgattttttcattcttccacctaagcttcaccaaaaattttggtgtgtgttcttgcttcaattttagcagaattcatgttgctctgagagaggatcttttcaaacatgtcttatccttgttagtgcctcaaactagatcctgttcagatatatcaagttagtgagagtttattttggtgcaaaaaaaaaaatttgaaatctatgtatagttttttcatagcacgtatttttcatggaacttttggaagacccgtcatatagacacactcacacaatggatgcatgtattgtcagtgaagttatgttggcttctgaaactcaagggattttgctgaaactcatgaaactcaagggattttactgaaaagtctcagcctcaattggttcctcttacatttgcatattctgtctgccaggtggcaaggtagaattgactgtaataagaaagaaactaccattgagctccaattattgtccatgcctcagagttgatttttaacctgagagtgacagcagccacctgggccaggggcagacaggtagtttgcctcacctggaatcagaggctcccctatcagccttatcttcaagaagctgataggaatgctttgtttttcttttgtgtgctggacaaggagaggccccggaaggtctgtcatgtagattgacagtttccttttgtaagactggccaactgaggccaaagttgaaaatgtcagtaaaaacaaatagtattgcaaaagggccttatgcatttccttctctatcctctcattgccccatcagccgagtgctgcatgagtggcttaagagaacaccattaggcttgaaaaagagtgaactgcaaaaacacattttctccatttcacctagttgttattttccccccatgtgctaatgatgcaaacaaaagaaaataaaaataatagacattggcttatgtcttttcaagttccatttcttgtttcttcttttactattttcagaatcaaggaagataatacagaattttaacagttttcttacctcattttgcatttgttagacattgtttcctcgtggttgagacctgcttcctgctcaggaaagagaaagcagtggttgcccatacaattcaataataatgactctttgtcattatttaacagttgtttaggtgtgcctctctcctttcttcagttgcactaatgatagaaaaggatccttgggcacatagtaaagtggttcaaatcatgggtttgggtggtaaacaggtctgagatagatttcctgctctgccacttaagagctgggtgacgttggggagtcatttaatttttctgagcttcacccataaataatacatacatacataaaactcacctttcaggtttctgaagatgatgcaacacagaatctcaaaggtactgggtacccagggacactgcagtaataggtcccctctcctattgctgtcagctcagaaatacagaacagagcaactgggattcagaaaggagactataggctctagatagaggtactcactcacttccttgggcaactcacttccctgagcctcaactttcttgttggtaaataagtggaatcttcctacccaccactagaactgtgcaaggaagagatggagctggttaatgccagttctgtctgattccagacctggttcttaactaacaacaaggagtggtgcctggccaggcacttggggcattgtcccaagaggatgtcaacatgtcttcttagagaaggacagtcattgaggcctgaggaagtgttcaggaggaataagcttcaccaggatagtttcaatgacttaaccctttgcatgcagtttcctcaagtgtaaaccgggggtcatatagtcccaggagttttcaattacagcctttgaagtcttttgagattgttacacaggatcaagtagaagaggatgatttctagctctctattggaatttcagattaatgtctacaaaactcactaaagtccttgtattgaataattctttacccaactgatagcagttaggcttcattttcaatgccattaactctgagagcaaacgacaggcttttggtctgccaatatattaaaagtgtgtttctgaggaaatttcaatgagtcattcgtttatataacaaatacttgttgagcatctactttctattgggtactgttatagggattagagataacagctgcaagcaagtaaaaggcccttgctttctcagagctttcattccaggaaggagagaaagagagtaaccacacacatcaatagatgaccaggctgttgtgaagacacaaaagccaaatgagttgagggagagactgggggttagacaagggtgtttagggaagcactctaaagtgaggtgacgtggagttaaaattctgaatgataaaaaaaatgaaccacctatgtgaccatttgaggatggaacattccagacagagaggaaggcagatacaaatattctaggatgggaaggagctcagaatgtctgagagaattgaagacaagctttgtgcttagagcagagcaagctactttgaggttagagagggagccaggagccagattatgttggttttagccataataagaacatttatactgggtatgaacataaactcttggaggttgtaagccagggagagatcacttgattgtgaaaaaatgctcataacataagattaagtggaaaaatgactcttaaatctagaactgtatattcagtaccatttcaattatgcaagcatatgtgtgagtatgtatatttgtgtgtatgtgtgtatgtgtatatagatacatactttatgtatatatgcataaagtacgtgtgtgcatgtgtgcacgtgtgaatgtgtgtattcagtaaacaaactggaagaagatatagaaaagtgtttgctgtagtttttgtagtggtggacttattttccttcattgctttcctgtgttttgtaagttttctgtaagtttgtatgacatcaataatcaaaattaaatcatttgctttttaaaaactttgttgcagagcaatcaatggagagaatgtaagagtgatattattttaccatgtcttttctcagatttgagcttaatatcatggtgctttggaatgctggagtgaattttgaaggctctggctagcagagaagtttatttggctttttgtttgtttgttctttttttttttttttttttgagatagagtctcgctctgtcacccaggctggagtgtagtggcatgatctcggctcactgtaacctctgcctcctggttcaagtgattcttctgcctcagcctcccaagtagctgggactacaggcatgtgccaccacacctgactaatttttgtatttttttttttttttttttttgaaacggagtcttgctctgtcgcccaggctggagtgcagtggcgcgatctcagctcactgtaagctccgcctcccaggttcatgccattctcctgcctcagcctccggagcagctgggactacaggcgcccgccaccacgcccagctaattttttatatttttagtagagacggggtttcaccgtgttagccaggatggtctcgatctcctgaccttgtgatccgcccgcctcggcctcccaaagtgctgggattacaggcttgagccaccgcgcccggcctaatttttgtatttttagtagagacggggtttcgccatgttaaccaggctggtcttgagctcctgacctcaggtgatccacccacctcggcctcccaaagtgctgggattgtaggcatgagccaccgcgcccggccttatttgactttttaaggagtctgtcctaaactgaacttattactgtctccaaattatttatgcaaaagaatctaacatttctatttcttcccatagatttgaatataacctgccgctttgcaggtgtattccacgtggagaaaaatggtcgctacagcatctctcggacggaggccgctgacctctgcaaggctttcaatagcaccttgcccacaatggcccagatggagaaagctctgagcatcggatttgagacctgcaggtaagagaccagcacccgaccactggggaaagctggcggcctgggaccaggcagctgggcttagaactggaaggctcctttcccacagctgaatggattattgcctaaggagtcaaccccacgtattaatttggccaagtcaatctgcaacctgtatgacaactggagtttaaagtcagctaaagacacctttgtgaatcatagagcgggaacccagaggaagccattaggggtcctctcggctggaatcctcttgtctaacctgcttccacagagctctcctggctttgaagaagctgcagtatcattgtcagaaccacaagaaaacataaaccaaataacagtgtttgaaataaatatgtggctgttagagtcttggccctgcagacttggatcaaagcagacttttcaaactactctctcttactctctcttaaaaaaaattttttttggtttctcttctatgtttctctggtttgaaaaagtaaataaaaaggcatgaaagttattaagctatattatattaagatatattatttttgggagccctgagagggctcctaccagttattctagagctgcatagagccttcctcaaactatggctccaagcaagataatcacaacaagcaaggactttattttttgaatttccaatggccttgcggtaagcggtgcacaagaagagcaagccacggtggcaatcacagtgaattgttgtggttcgatttgttttcactagaagaggactgagtaacctctgcaactgctctgaagtttctaccccagcctgtagctgtgcttttgcagtgtctttaggtaatatgattcccctttctctgcaacacacactcacatgcacacagactgcttttgaaaagtcaagctgcagaactctacggaaaccatgaagtgtaagttaagtgcttctatcctccaacactggttacagtcatgcacccacattatgagtgatggctgagactcttgctgaaagggaaaaggaaagtcttttgcctaaaattgccctgtctgatatggtagccactaaccacatgtggtgacttacacttaaactaattaaaatactaaaattaaaactttagttcttcactagcactaactacattttaagtgctcggttagtcaccgatggccagtggctactgtactggatgacccaggttagagaacatttccatcattgcagaaagttctattgaggagcactgctctaaaataaagagcagatgtacatagacatctgtatgtgttcagagctaggtctgggggaatatgaaaggagcagagagagggagaaagctctggtggctactgaacttgcactgtaggatgcaatgaaaaaaggccatttagcaaatccattattctattcccaaggctaattgtttaattatggccctgactaggccactggcctaagaaagtgaatttagtaagctgaactttgattgtgaaatacaaacaaggcatacttgcaaaatatagatatgctgccatgtgctgaggaccaggggagttcttacaactgccactggccaatcatcaagcacttagatgctgggagccctactgcccacctggccaaacccctcacttaatcctcaaactgcagtattggtcaatattatcacctcattttatggatgaagcagccgaggcttagcgaatttgcacacacagcctgcctatggaggagttaggattctggttctgcttagcctcagcccaggacaggattttaatgaccaagtcctcctcaggggcttaaaaggggaggaaagtatgcttcctggatttgctgaatattctttcctccttgtgaacagtaacttactcatgccacatacacacatataaactttaatatccccaatttacagttagcatgacccataaaaccggtaggcaacatgaggtggcaaaaactcagtaatagcttacaaagagaatgcaatagattctagaatgttggtgttatccatacttgatgacatgatgtgatgggggtgagttggcgggtaggttcaccaagaagtattatttagaaaaactgtgccaaagaaatctatcatttcacccataactggtattaagtattgcaaaactcatttccataatttctctcaggtagctatgaatcagctttctgccacaggacagatggcagagtctcatgggttaggataaaaccttagcagctactctcttttgtctgccccaccctgattggtagcaactcttagatatatgaaaacttattaccatttaattgtgcccacaccccctgccaagctaaggaggctttggggaaaccagtttgtctgttcagatgagaaattagtcatgcgagctacaattgccacataggtaggagttctgtgtgcttggaaacttcagactcacagacatttccatgggtcgtgcagggtgatgcactccatgctgttgcccctggcaggaaagatgaaaagcatcaatgtgcattttagccagaattgcattttgaaaaacctgctggatttagcttcctcctctctgccctcctgctgcaccacagcttcccttgcacatggcattttctcagcccacatctcattttttgaggcattttatattcaaaaaaaattgtgtttttagcacaattaaaaaataagcaagtttttagccaccaggatgctgctagaagaggctgggctgtgtatgttgtatctgtatgtcgtatccagctgtaacacactcccagagataccttggtggggagagaggggctatgcatttctctggctgtgctacttctggaaagttcctgagctacatgagccgttgctatctgcttacttaattgctatgactcccattgtaatgatggttaatttattcccactggcaatagaattatgcctgcaatgctcaggaggcagtgtgctgtgctgtgtacttggcatataaacaaggcttcatgtttagggcaatggagtatggagtaaggggactcacaggaaaagttgtggctgagaaagaagtgggggaatgggacatgaggcaggtctggaatgtgtgcactgaaataaagaagcaccccttcctatctatggaagctggccattttgtgtattttctggaaaacatgaaggtattccagagccagcatgaatcttacatcaaaacttctctcttctgtgactcaggcttccttctgtttgttcaaatagactcaacactgctgaacacaaattttaactgaaactaattattcctttcatgatttttttttaaagctctttataggtctctaaataaaatcactttgtttctatcagtcttgttgatctctttccctctctatgctgttatttttggatttcaaataactcggttgttgaaacctccgatatccctaggggtgaactgaatgaagtgttgcacggcattaaatgtcattgaatgggatattatgaaattcccatcttagccatttaggtcaatatcctgttgtttttctcttacaggtatgggttcatagaagggcacgtggtgattccccggatccaccccaactccatctgtgcagcaaacaacacaggggtgtacatcctcacatccaacacctcccagtatgacacatattgcttcaatgcttcaggttggttctcaggggggtgtctgttggcgtgaaaggctgtgggagcctggtctttggagctcagcttaagtggggattcatgtagcctccatttacataacaaatgctcactgaatatctgtacagcagagccaacattcctgtctccatggagcttacatgctaaattggggaggcaaacaataaacaaataaatattaaataccattcaggactgtccaatcttttggcttccctaggtcacattgggagaagaattgtcttgggccccacataaattacactaaaactaagagtagctgataagctaaaacacaaacaaaaatcacacaaaaaaaatctcataatgttttaagaaagtttacgggtttgtgttggaccacattcaaagtcatcctggaccacacaaggcctgtgagccgcaggttggacaagcttgccctatatgaagtctgaaagtgataaaagtgctataaaaaagaaagcaaaatacgaggctaatgagtgctagggatgcttttattttctgagaaggtggtcagggaaagtgcctcctggactgttctgagaatatcagtgctcagaagggagaatgccaaggaataaagtcagagagctaagcaagggccagctaacggggtgattcattctcagtgtgatgggaagtcattacaggttttgaataagggagtgacatgaatctaatgatagctttggggtgtaagtcaaatgtcttagctgagaggtatttattatatgagagggctggaaaaaagccttggagagtatatggtatgcctttgaccttcttaaatatcccttacccaacagttgaaagaaccagagaagaagaaacctaagttaagatgtagatgctaggacacaggccagcctttctctatgtctttgtgactttctcccaaccattaacctagaaaatcaggcttatgagccttattcaagtcctagcaaaattaaagaattctatgcatcatgaattttcagaattttttgagaaggatcaaaatataaatgtcaaatatctcgatgccaactatcaaaagtcttacctcttaaactgggccttctgttcccatggaaggtttgaagttgggtgaagggaaagatgaagccttgaggtaaacttggtacatcttgctggagtgtcagttttccctaaagatgtgaaggggatgttaaattagctggaaagggacttaagacattatcagcctgagacaaacacagatatatacatatacatatatatatatttatatatatatttatttatatatatttataaatatttatttatatttatatatttatattcatttatataaatttatatttatatatttatatttatttatataaatttatatataaattatatttatatatttaaatatatattataaatatataaaaattatatttatatataaatttatatatatatattatatataattctatatataatataatatataatatatattatatattatattatatataaattatatataatatatataaattttatatatataaatattatatattatatataaatttatatttatatatatgtatatatgtatatataaatatatacacatttatatatataaaatcaagatatcacagatatatataccatatacatcaaatataaatatacatataccatatatatggtagtaaaatataaaaagctgcatggatttttaaactataaaaaggacatcaacttaattatgagatctttcttctactcactactaaaaaaaacccaaaaattaaaattaattgtgagattacatcagtggctttagtctacaccacctaccctttgttgtgtgaacagtagggatcagagtggaaattcagagaagaaatctagagtttaggacaaagtatcagggctggctagttgaaatggagtgcgtgaagccagtagattttgacaaaaatttacaggtcactgaatctatcgagagacatacgaaacaggaacagaaaactgtagaatgtttactcctccctgttatatgagtgaagaacacaaatggagtttgactaaagggaagggagtccaattaacactaagtagtacacgactcatacatactcagttcccatacccatgtctagcatgtcgttctaatgatattataatgagaaaaccacatataaaaaagtaagaaatagacatagagcaacatgtggtctagctagctccatctcagtgcaacaggtcagagggagacattgggaaaagcttgtgctttagatgaagaggttgactcattgggaaagggctggcatgaggctatacactcctgagtctctgggcactgcttattgcatctcccattgagtcttgctgagtgaatgtatgcaataaattatgtagttgcatacccacattgtcttacctgttttgcaagttggtttcacttgctaaaaggaacctcaactcagatagaagctcacactgttttattgcctggcatcgaagccatctaggcaggctgcgactgagacttgtttctatccttaattttgttcatgaggttgggcccatacctggagttgggagcaagagcattgattaattttcttctctttggagggttagttcagttgaaaagcttgagaagtacagggggtatgttccttactaaaatggatgaattaaataataaagctagaagtaatatttttccttttgtctattttccaaattgactcgatattgatggctacttttgtaagtttttatttaagtttaaagggaatatttattgatcacctctatgtgctcagtactgcactaggcagagatggagtaagaaagaactggaggctacatttcttgtcttaaaggagttaacaatcttgttgaagcaatgagacaaaaaaaaaaaaaagaaagaaactggagaagaggataaatgtgtttaaggataaataaattctgaatgtcttggattagagtcagatgataggggtattaagtgagctaaagattttgataaactgccctatgcaaagatttcattgcaaggatccctgaatctaatttagcctgaaagctgctagcaggtggtcatgtcccagtgctgtgatcccccccataaaacggctacagggataaaagtcagcttgatcttagtagatagcttccataagcttaagttttagcagtatttttagaaaacatggcctgtggctaacaaatgaaaataaggcagaacttgaaaaggcctttgtgattttttttccctcattttcagtggttgaggcccaacgtgagcctggtgacttctgtgtgaacacagaactgacttgaattgattcatttattaagcttgctttcagtcaagtgcctcattttcttttgagggtagaattaaagggaagattctacatgtacttgtttatccatttcctcctttattcaacaactatttgagaatatttatgagatacctaaaatgtatcaagcattgaagagggtgcctttctatctggcaaccagagattagtggttagactgaataattaatgtttctcttggttattttggtgtgttgaagccaaggtttatgagaaagcccacctcagagaatttctaacaagtcctcagattcaggaacacctcaccaggtctagctttccaagcagtacagagctcattaaatggaaagaaaggctatctaataaggccctggaatccgacatgagagcatgagtctgttaattgcacatttgggtcaatccactaagcatatttgccagatttgatgttctttataaaagttaaggtgaattggagcatgaagggggtccatgtgaacaaatgctctaataatttacaaaactgtcttagggtttgtgacatcatgctccattctattacaacttgctgcctggaaattcccagtgtactgttacttgcagttatatttgaagttaggggagattgtttcatccctggcatcaagaagccataatccaaagcctggttccaggtatgcacaacatacaaatatcagaagcatctcataggttgcgtcagtttctgctgatatttccaagagaaacaagatagatactcccctaaatctcccaggttggctatatgcccttattttcaagtgtaataattttggaaaatatttttgaaaactgtaaaaagctaaattaatattaattattacagtcccccatgaccttgtgagtttatcagaagcagggacagaaacatgctcatcttcttttctccttttatatggtctggcatataagtgttgagtagatgcttaaaaataataaatgaagagttatatctgtaacttcctttaattatttcttatggcattaccatttaaggataatctaaatgcgtgacctgtacatatttggagatgcatttagggggctaacatcttaggtgtgtttactggaagaatagacccttgggaaattatatcggtacttttttcttttttcatccattcaacacatttttattgcatgtttctctgtccccatcacacataaatgttctggccaagacagataaagttattactcatctgtggagcttatacatttctagggagggaggcaggtagcagaaggcagagattgagagaagtgccatgaacagccatcaagtaagatgaacaagataagtttatatggtggtaaacatgaagaagaaatgagagcaagatgctatgtgatggtgacaggtgtgggggagtgatgaagcagtttagattggatggtaaggaatggcctcgccaaggaggtgatacttctctttaaagaaatctgagaaatcttttaggacaggctttgcaagaatggtgtttcctaaaactttctgtttttttccaattgaatgtataaaactgccagttagttccactaactgcccaaagaaatgggcaggttaaggttatcctttttatctgtgggaaaagatgctcccaggtactaggaagcaaacaaaacctgttttgttcaacttgtgtttctatccacttttataagtacacaaaaattatagcaggacacttaaaatacttgtgataacagcctttcttgtgatagcagtctgtctgtctgcctgcctgtcttcctccctccctctctccatccatctatccatccatctccatccatccatctccttcttcctctttgccaggagcaattctgggagaaactaacctaacaaataaatttccattttaatttaagtatgcacacacacacagaataaaagctgtaatgcacaaatggacttaacctttctataaaggcaaaaccagtttaaagctctctgaggttttagagctcaatacaaggtatagtcacagaataaagcactttggcatgaatagaaggttgcttcagctacactgcagtctgcttttaagacacaaggaatggaatgcagggtggaagtttcagggcctgttatcagaccgcttgagacagtgctgctcagagggctaccagtaacatctgtggatgatcagtcaggcccaagattcaggcagaaatctttattcctaaagcaagggatgaaagagtagaggataaaacgagaacaagagaaaaaaaaaaccagaaatgcccatgatgagatatgccaaaacagtaaccttgaaaaatattctgggcacctaggccaaaggtggtcaacctcagaagcaacatgctgagaagcagtctatacagagtaagcacctaaaagatcagctaaattaataaatacattattacattaatgaaagactagagattcatttggtttttaatatttcaactgagtaaattctttgttgtgattatgttattttaaccttcagattgtcatgctgttcatgttgataaacatttgattgtgtgtctgccatgttttctcatcatttctgtggacttcccagattataaatgattttctcatgatagttcatactttacttttaaatttttttacaatgttcctgcattacttttgtaatcacaaattttaaaaatcctccctaatgtgtttgcattagagaaggagccgtgtctatcttatttaaaattgtacccccaggcttccacagtgcctgatatagaatgtatatttattaatgaatgaattcactgtggtgggaaaatttccggaaacttcataagttccagaaatttatgaaatcaggtaaaaacggaaaatccatcaggaaaggcagagaaattcctagccaacttaggagtttcggaaaaagaaagttatttggaataagttatagtaaaactccattctaactgactaataaaaatgagggtagattttcctcatgtttttaaagggttctcatcctttttttcctacctcatagctccacctgaagaagattgtacatcagtcacagacctgcccaatgcctttgatggaccaattaccataagtatgtctctcttctaatcttaattaaattttcctattttggggaaagggctcaggtgtgttctctgtggtatatttgaatagaatattaggccaggtgtggtggctcactcctgtaatcccagcactttgggaggctgaggtgggtggatcacttgaggtcagaagtttgagaccagcctgaacaatatggcgaaaccttatctctactaaaaatacaaaaaattagctgggcatagtggcaggtgcctgtaatcccagctgctcaggaggctgaggcaggagaattgcttgaacccaggaggcagaggttgtaatgagctgagatcgtgccactgcactccagcctgggcaacagagtgagactccatttccaaaaaaaaagaaaaaaaaatattagtcatttccctaagactaagtaaggacagttggctttaattcagtgtcccttcctttttttctgcaatgacttgaaactgctctctggtttacactcatgcatcgttcctcaaacttcagtcatttgaaaaccactttcacattttttttggcatctctatatgtacaatgctctcatttacttgatatttttatttaaatgatccactgttttctaattaaaatacacttatttttaaaaagaaattgcacatggaaaaccaacatcacatcgtaaatagaaggcaaccttaataataaacttaaatgtaagaaaaattaaataatgttcttaatttgcagctgctgaaagctctgggtctgagtcatgttctctcttataaagagggattaataagtgtcaggtgtaggggcattttggccctaattagcaattttctgtttgatataactgaagtattgaaagataatcatgaaggatataaacttcctgatacgtgttttgacattgtttataccacatccatcttaaatcatcctgatatatgattatccacagatgtatatattcgggcactttttaaaaatagacatgggggtctcactatgttgtccaggctggtcttgaactcctgggctcaagcaatcctccttcctcagcctcccaaagtgccaggattacaggcatgagccaccatgcctggcctattccagcactttagaaatcagaaaatctcaaccagaactttcaaataggctaactgctaaccctgatcttacggcctctgagcttcatttaatgggaaacagtacagtgttgagaggtctgatttctgcttcctcacagctggatactgacagtgtgcacaggcatgatgttggcagtggcagagggatgagaatcttcgtagaccatacaaacccagccccacattgttatgtaaggaattgtccctgacctgtgccttgcaataggaaggggaggcttcacaccatgatggctacgacatgagatgtgctgtctcagcaggcctggtatgaaatcctagttccctcaccatgtgtgagattttagaggagtgactgatcctcagttttctcattcatataatggaacaacctatgagaatattcaggaaatttgtaaaagacactatgtctaatgtatgtccagcccatagtagaggtttaataaatgccctgtttctttgatgcccacagttctcttttgaagtccagacatgtaagagtgtggtcaacaatatttccttgtcaaatcctcacctgcagagattaccagggtgactgagaccttgattttttttttcatttatgtattattaatagttccacttgaggcttgccacagtggctcactcctgtaatctcagcactttgggaggctgaggcaggcagatcacctgaggtcaggagttcaagaccagcctggccaacacggtaaaaccccgtgtcaactaaaaatacaaaaattagctgggtgtggtggcatgcacctgtagtcccagctgcttgggaggctgaggcaggagagttgcttgaacccaggaggcggaggctgctgcacactgagattgcaccactgcaccccagcctgggcaacagagtgagactccatctcgaaaaaaaaaaaaagtttcatttgagcaagctaaatatgtggccaaaaagaacctttagtcccatcaatgcaatacagcagaaaataatttcatctaaatgcacacctgcatagtgagtggcccagacttgagagcagcaaatacttctagggaggaataatgaatgaatgcattcaggctttttcttctccaattcattctagtcatttgttgaaaccacagatgttgatcttcatgtatatctgtgcttgttaatttccaggttgaatttcacagagaacggcaaatgctcttctgtatttagacctgctggtttcctagccagaagtgggtgtttgcacaagtggacaaaacttgccccttaaaaaagaaaatcaaaatcttcatcattttgcagatgtatcttccctgctgaggctattagtctgctacttcaaatccttttcggaggaatatatggaattaatagcaacacattttatatgtacttcagaagggagagtagggaaacaagtgggagaatgattatttattgagcatccactgtattttgaatactgtgctgagcactttacttacaatgtatcacataatccccattttacaaatgaggaaactgaagctcagagttgccttgtccagagctctatgaagctaggattcaaacacagggatgggactctccagtacttccttgtttcctgcctcatccccagggtgtgtgggggatgggagggtgcactttcttagtgcatctgccactctctcccaccactggatagataggtgtttctcattacaaaggaaaatagctttgaagtcactatgttaaacgctaatccacatactcaaaatatgagctgtgaagttctgtaagtaccttttctctctcccagctattgttaaccgtgatggcacccgctatgtccagaaaggagaatacagaacgaatcctgaagacatctaccccagcaaccctactgatgatgacgtgagcagcggctcctccagtgaaaggagcagcacttcaggaggttacatcttttacaccttttctactgtacaccccatcccagacgaagacagtccctggatcaccgacagcacagacagaatccctgctaccagtaaggagaataaatcactgtgcttcccaatagcaattccctggcaaaatgtctctgaccttcctgagcattgcacactcacgtgctgattttctcgtctctagacagctggaagctggtgatgccattcagggaggtgggctcttgtggttgtcagtaaactgcctgcattgactactactgcctaccttttttcctcatctataactgtttttcttaccttagcataagaagtgccatattggaagttttattttggggagagccctccttattctcttatccccaggtatacagtaacaattcaagcctgatatgaaaactgttttcattttttcatgtttccttcttgttcttatccacctatggataagattgttttcataaagttgggatcatagagtttgcataccactccactagcaccttttaaaaaacccacttatgcctgaggttgcaattttttgaatttttgcaatcagaccttggtgatgacaatgagcagtaggatataaataactcccacatgcttagctttccaataatggaacagtaggcatacgtgggtcaactgtggctttttatgttttaacttgatttacattcatactattgatagtgtaatattcagtgattttcaccaacgataatttactcaacaattcctttgtttttagtccaaggaagcatatctggaagagttttctggtgaaattaaatcagcttaagagctctataatccagcctgttggggaatgttctcaatacttacttggtgtgtgggggtaattcattacttagggttgcaagagtggaagtatgtaaacattgcgttccattcctttggagtttgcccctcgcgcttcagctccactggaaagtgtttacatctctcttgtctcctgtttccctctttgcttttcttctatggtttgttttgaaatgggctcccagatgggccatgttcctcctgtggaggattaatcaaactcaaatagggcatctgcctctggagcggttttcctagtatggtgtggatgttctcttttcctggctatagctcctgaggggtgaaacttgggcctccaaagagtgtggcagaaatgcgctggcttgtgaatactcaagacagggcccttctctattccttgtcacccagaagccagggaaacccccacagtactgtgatttcatttaaggtcacttgcgcaatagtgttttaaatttctgtcagtctctggctgagggcatgatacaaataggcttggggttcccatcactccctgcacattctttgaagctttttaaaaagcagagttttcaagctgcccatactttcttgggttattggccctcttgagtttgcatcggcttattgttggtagtcccgtgggcaacccttcttgagagaggcttctgcaaaccaagcgggccgtgctgctagctactcactgcttcttgggttccctgtctttttaaagtaaccatgtcgaaggtgcttatcattatggtaggcaattttgtcggatgttagcgaacacaataattagtggtctcagcaggaaggagaataggtctaccctaaagtaccacttcccaccaaagaagaaaatcctgataaaacataacttgggactatatgtagttaacattcaaaccactaatagcctatataaaatagtatttcatgtgtgttttaaaaacacacatttcattaacccctatagaatatctcttaagaactgtatcttcccttcctaagttagtcagcaaacgtattttgagaacctactacgtaccaggcctattagaatgcttgggatcgaaggataaacatagttaggaagtaatattgaagagaggcaaggattactgagatatttattcattcaatcaatatctgaggtcttctgtatgccagacactgctctaggatgctaggaattcagagttggacttaccttcatggagactacatattattggtttagaaatcagggaaaaggagtgtttatgagatttaactaaaacatagttcaggatttgagctgagaaatgaattgtgcctttctcctcccagataaattagttaagtttccttcagcagctaaaaaagaaagagactaatgagtctaccaaatgagtccagggctaacctgagagtcactgaagtactataggacccaatgggaccagtagcagctccaagtggatcacttcatgcaaagaaacataccaaggcaaacaacctggtggaaacttgaacgtagcataatggcatgccaggaaaagtcagcactgttaggttcctgagtagaatcgtatttctaaagtccagtgaggagatttgcaaaaccttatcactgttggactgagagctgggacagagtgacagggagtgattgcaaagcctccctcatgcattgcaggagggcaggggtcaagaggagtgctggctgagagcacagaagaagcggtctttggctcggctggctcattccttcctgaagggcctgtagtgggtggcaatagggacagctagtaagaataaccatctgggtagctttaggcttccagcaggctgtttatcttgagtgtcatcagcctcttcctattggtgacctggaactctctgggatcaagaaacctaaactaattcaggaagcagactcctgccttggaacactgtatttccttgtcttctgggtgtcaaaggaattctttcttttttttttttttttttttcagatctggtatggcctatttgggtggggaaaattagaaattctgctggctaggcagtagctttttccatttttccccctcataccactcctttcaggaagacaaaaataacgcctatttctatcttgttcttgtaggtttgtttcctctggtactattttttcctgttgtactattgggtgagggtggtgggaattatgcatctttaataaagtttctgaggtgagaatgtggtgtctgtggattttcccggggatgctcaggtttgtctggaggcttcatgggtaaaattggctcctatttctctactctctgttctgaactaatgtgtcctttgcagcaggggtgtccagtcttttggcttccctgggccacattggaagaagaattgtcctgggccacacataaaatacactaacactagccatagctgatgggataacaacaacaaaaaaagcttataatgttttaagaaagtttatgaatttttgttgggccacattcaaagccatcctgcatcacaggtggcccacaggctacgggttggacaagcttgatttagaggacagaacatactgtgccagctgttggcattttatatagatagagtcaaagtttttaacctagggttcatggaccttcagtaggttcaatggtagaccataaggcattctagaactatctgaaataatatgcaaaattttgagtgtgtatatgtagcatcacttttttgaggaaggaggacataacgtagattttcaaagggatatataatttaaagtggctttttaaaatctcagctggcttaaattagatatttatcctgatggtttttgccattccatttcaataagaaaacatgctggactcaagtcaaacttgagagtcgaatgagagattttaaattgcaaaatgttactgatgatattttctctaatttgagaaaagtctggaatttctctaactttggcaactctagtttttggtagaaacacatattgaattagaataaaaagtgacagaaatgatagatggatacctgaggaagttttatctgatttcgacactttgaacacattttctttgcaaagttcctgctcaagtatgaagtttgacctgaggctgatgcgtgtgggcggagctttgaaatgccagttgtcatcacaaactacctgggtacaatgctagacagatgtgaaaaatacacactagcaacccaaagataatccaaagataaatgcatgaaagcagtcgtttgaaatgctgcttcgaaaacctccagctcatggctcagtcgcccaatcaagtaaatagaaaatctctttccttcacaggttattaaattgctgcttgattttgctttgatcatgaattcaggggattcagtttgaagaatgagtagcatgaaatttatacccatgaggaatttgcatttctgatgttgtcctaagattgtgggagacattaggagtctggaaagataaaaccaggcctagattttcttttctaattatcattcaataatagatacagacatcatatataggcagaactgaaagtaaagatttgtagagggaatatcactaagtgatactttcataattgatccagttacttcaactgtgcactcaaacagccacgcaacagctcaggagcaaaataactagatatggtcctggtttggtaattcacagcctaagactcaggatctcacaacaacagcaacgacaggtaaactgctttgtcttttgcttatcagctctcctggatgtcagaccttttagtgttaggggagaggacgtccattatcacgtcaaatctccttcatcattcttagtgagaatagggtcttgtaccacttcatatatcagaaaggcctgtggatctggggatatgattgatattcttaaatgtcctgtatgttttccttttggcaatgtgtatatagaatcagaatgatttttccatcagaggaaggaaaaactatgaatcaatagttttgaatgaatgaatgaaattatgaaaaactacaaatgaatgaattgactgtgtgattcaatgagaaaatgtcctttagaaagaagtctgccggaaagtgcaggcttctcctttctgctgatctgattctcacagccagtaataagagaaggaaatgcagatttctctcatcaaagtgtaggccctgaacccttctttggacacttaaaatctcaactgtaaagtgtaggaaatgacctgttgctccatatcagaatctaggcctctaaccagctccctgggtgtgtggctcttagctctatatccctgcaaagtgtattgttacaggagctttggggaaaaacgattcaaggcctgtaaatatgggagattacaaggacaccctcatttattaactttcattgatggagttaatggccatatttcaaaataactaggcattctttctgcagaggggggtaataaacatggaaaaattattctttacatttgtttgccttatatgacattggataaattatattctttacttctataaataatcgtgaggaaaatagtgctcatgttatgttatggttgccatatcacaatgtctaagatcatgcaggggtggggaggggggatacagagattgcagaataaagacaatgctatttttaaatgttgacaatgtttatcttcataggacaaagaatgtgaaggaaaaggtctttttggcagtgtttcatcttcttggttcatttttgggctttcttgatagctgaaaaaaaaatctaactcaccttactattttgtttggggatgatggtttcagcctctctgcttgaacttgttctcagttttttgtctactgttagctcatattcttccaatgcacatttttgggcattattggttatagaaatggcagtctttggagatttttaaatcaagactcttgcttctggtcttattagcaagatcattggggtcacttcatctctgtctgtctttcctgattgattatcctattttcaaagaatgagactcaaaatgtcctgttctgctttgcaaaatatagtttcacataagaaattaccttgggcaaggttgtgagaggatttggaatctaaatggagaaaagtgtagaggcatatttttcaatcttctacttctatgtcattttccctgtgtgttggattgctaagattatgtatctattgctggcagaaatatcatatcctaaattcttggagaatgatattggttgcccaagattgtatagaagattaaggagctaggactctgaagagctgggttttagaatcataaactctcaggtttggaaaggatgttaaatggtctggttcaatcaacacttctaataatttaatctcttacacaactttcttgccaagtgatcttcctgactatgggaaacataatactttatgaagaagttcattgttggatagttcagattattggttttttaaatccaacatttggaagaacattcctcttcctgaaattttcaccacagatcctaatttggcctcatggatccagaggcaaaaaagtttaatccctcttttacattatatagactttcaaaattcaaagacggctgtcatgcgttcctggagccctcactcttgctaattaggcttctgacttcagacaggtcagaagctctgtccagcaaaatttttaaatctttaatataaggagcatgaaccagatgacatttaagatccttccctctctgacattctataaacttcagtttgagtctctgaaaaaaatggaacttttttgctttttccctttcttttcaccatctatatcaaatatagatgattctcttgagtagtaaaagagtacaagcatattcaatgctatttcttaggaaccgttaattaatctttcaacaatcaattcaatcatgattacaacagctttgatgagcactagtgctacagcaactgagacagcaaccaagaggcaagaaacctgggattggttttcatggttgtttctaccatcagagtcaaagaatcatcttcacacaacaacacaaatggctggtaatgagttattattatctcatagcgtatgttttcttgacagccttgaataattttgattgacctctgggatgttattaaagcctaacgttccttctattctcacaaattttcgttatgacttcagaaggatcattaactctggtatctgtttgtttgcttgtatggcaccaataagcagatttcttctttctaatctatggattagtatagaccaggagaaggctaatacagagactatgaaacgggaataagtttttttaacgatatggcaaaattgtgactctgaaagatcattcatgtatattctaaaattaccacagtcataaaaagtcttggactttcatgaggaaatagcatagctagatatgaaaaaatatagaaaatcttcatcaatggaactattcttggggtagacactaatcatatgaaaagacaaatgctcattccctaagatagcctgaatctcatttaaaatgtagaaaacccctttttagtaaagagacatcttctacagtaaccactgagaagaagtggaagtttttcatctcctttttttattcaaaaagaaaaagaatttctcaatttctgaaccacagttcactttagttaacccctttgattgcctaataatgccaaaaatgatttctctgttaattggcttcacatttttgctctatgctgaagtagtattgggaactgcagtgtagcttccatctctgtttggaggtacactgatctgatctgatactagagaagataaaaaatgaattagcaaattgtgaacacaatgaaatgactgacgtaggtgtagattccaacatttttctgaaggtgtcttgaccaaaaaaaaaaaaaaaaaaggcacgtgtgaaacctttccattctgttcttgatggcttggctttaatggcatatggttaatgagttaataataaacatatctgaaagtgtgggggagttttcattagcctttaaaaacttatatggtgagattatgtccacacttattctttcagctttcttaaagagaatattcagttttaaagatcatagccacttgttttgagatttatgtattagcttcggagatcagaacataagaatttggggtatgcaagtcaactccctcactttcttttaaaaatcctgggaaatccattataccttctgtgcctgattttcttcctttgcaagtgggttgcttggcgtccagctcagccactaatgcaagtcaccacaacaggtacgtcttcaaataccatctcagcaggctgggagccaaatgaagaaaatgaagatgaaagagacagacacctcagtttttctggatcaggcattgatgatgatgaagattttatctccagcaccagtaagaataatcaattacagtacagccatttatgcaaggcttattgattaatctgagtgataccaaattgtatctctcttgagaagtagttaatgtgaaaaatgggtgaacctatgatcataccttagttatatcttgatgagattatggaagaagaaatagaatgttttgagaagtggggaaaatatctcacaaaatttctcttgtctcatgttcttcctgttttatttatctatgggatctactgctacagattgtctttgaatgatcaggctttatcagagaatgacattaaaacagtacaaaaaatgtacattgtgtacttactgtgctaggtgctggaaacacgaagatgaaaagagccagagcctttgcttttcagaagctcatggtctgttggagcaatagacttgaagaatgtgatgaggagggtattaattaaaagttgtaggccaggcgtggtggctcacacctgtaatcccagcaccctgggaggccgaggcgggcagatgacgaggtcaggagatcgagaccatcctggctaacacagtgaaaccccatctctactaaaaaatacaaaaaattaaccaggcgtagtggcgggtgcctgtagtcctagctattcgggaggctgaggcaggagaatggtgtgaacccaggaggagatcgcgccactgcactccagcactctaacctgggtgacagagccagactccatctcaaaaaaaaaaaaaaaaagttgtggaagttcctaaattgaaggccctaaaggcttaaatgatgggagctagaactcaagaattatcttagttaatcaaagcccagctgaggtcaaaggaacaaatccagagttttaacaaatgagctggacaccaatatagcagaaagaccttgaagggaagggcaaatgtcaggttagctttagcaagacattgccacttattaaaagcaaataatgaaaccactattggtacataatagtatccaaatttttgacaattataaaactttttgagaacaaagagatggaaattgagctttaaagatatccttaaaaagttaaaaacatgcaaaggttggtctaatattctgccagattactgagttttccacacatacctgtaatgacttaagattttgctgaacagagctgagaatcctgaacctgactccatcacagttctgcttttccttagaaaaaaggcttttggggtgctgtgtgagctctcccaattcactgaagttctatccattccattaaaatctgagaatttcatcctcaaatggacagagaagaaagggtccagaaaaaaaaatagcttaggccttgaaggcatctgagtatataacattgatatgacaaatactcaaaaggaactagaattttctatctaaacttttaagtgattttttttttagacccgacacccctccagagcttaatctatggaataagaaaattccttttggtaacttcagaacaaaaaccaaataatcaaaaacactggagttttacattatactgtctcctgtgttcagcatgtggcccagctttgcagatgggcccatcagtaaatacgtggtcttgatactgaagaaattaaattcccttgggtggtaacccaaacagatctacctgtaaatgaattgtatggtcaggcttcagggaaaaatttcccatggtgttggttttttttttttttttttttttttttaattttttaaatctctatggcatatttttccaatttctgcttttctttttttttcttttctgcttagcacctatggacataattcaacatgatgccctctttcttctggaggggtgtgataactgcttgataataagcactttttcaggcctattgagaatgtggttaatgattctaaacttgatttttcataacttgtaaaatagagctgacagtattatagttctgaaaacagttttgcgttatttgggtatcaaaataaagtttgaaacaattaggatggatttgcaaataacctttcacaaaacatgttgactcagattttgtcatgatccttctgttaggtgcatctcttattccagccctaacagattgggtgacaatatcagggtgctggtggatgtacgcctctttctttccagtgtgctgctatgatggtggctggttacctgtggtgtcttattttctttcactggctatgaatggcttgctcatgacatattttgtatttgatgagaataccatagtgtttgataaatattcagaaatgtatcgctaaaacatatggctattctaggtattctttttcagaatcatctataggaaagctctagctgctcaggcattcctttccccactgaaattactaacaacataaagtgattatcatggtataactttcagttatctgcctcttcacccggaggatctacaaacagcacacagtgactaagtccctgggctttcaagtgcagagggatactacagactgcatggatgggcaaaatggcgcctttggttatcctcggtggagggctggtgttttcaaagctgtccttcctactgctgcagcttctttgactgttttatctggaagatctcatgttctgaaccccaaggtattctatgacagaatgcaaaggacactgagatgcttaccaatatggctgaattaagctgaagtcaccctccgctttccctccatttccatgcagccatctatacaacctggtatagatgattcattgcatagcctacagaagcaagactatgtgcgggacaagtggcgaaggctcaagaaataacatttttctaattgcttcaatcatcgttatcacagtttcaaccacaccacgggcttttgaccacacaaaacagaaccaggactggacccagtggaacccaagccattcaaatccggaagtgctacttcagacaaccacaaggatgactggtaatgggttctgcatatttaatgaaagatttttttcccctcaaagcccatgatgctgcaaaggtcaatcatcgaggcacagtgggaaatttagttaatatctgatcaagaaattcttagtggacttttatgaggatacttaattccatttaggagtcatttatcaattataccatgtgggcacaggattttttatgttgcttcatgataaaaatgaatatgtttgaatggtttgtggttctgcctttgacaaactgatcatagtggaataataagggaacatgaagaaattccaagcccattgattttctcttgagaccaattaggtaaagtcactcaaaatttttgagagtggatgctcagaggtaacactttggcatagaattgttaaatagcatgcactttaatggaagaatagaatcattaaagattggttgataacaagtcacagtgtatttaaccatcatcacagcagatgtagacagaaatggcaccactgcttatgaaggaaactggaacccagaagcacaccctcccctcattcaccatgagcatcatgaggaagaagagaccccacattctacaagcacaagtaagcaagatggcggtcggcagttctgggttagatgaattagtaaagacattccagcaatagggaagattttgtttagaaattggccgcatcttctatttccactcggtaatttcttttattcttagagcctgaaaagctgctaaacccgcacacaaattttaaaaattggaaggaaaatgataactcatcaggttgcccaaaggccaaaatgttttaagaagtagatctagatacaatttttgtgttaaaggttcctagaggttccatttgggtaacttgtgtgtgttcattgaaatgtgtggcaaagagtgtgttcttttggtgcttagtagtggaatctggaaagaaagtttgtcaagtgaattgatctttggaatccttattttctatgaagatctttgatgaatacagtgtcttttttgcattctgtccctgactgttctatagaaagacatcccttgtactctttagagcaaagttggtagctcttatggtcttcatttgaattctaccactgcttctttttctgtttttaagcccatggtaacttggggaaggctttgatgctcttactgttatttctactattatgaaaactcaggttttctaaaacaatctcaagttgcggcagtggactgtgagaatagggggccccctcactccccaaacataagaagtatgtgcttttcttcttttatctatcccgctgagatatgtctatcttatttggaataaaagtatttattttggaaaacagctttttagcatttttaaaatgatgacccaactgtcattctcacagccctagatacacctaatggggaaatgtgagccacttaaaagccacttaaaaaccaaagggctttgggaatctatggcttgaggggtgccttcagataacaaaagaaaagtttcaggtatcagttaggatagaggttagacattgtactgaatatatccagcagatcttacatcccattacaaaccccagtaggtgtgttgtatacatacggcttaggggttaagttaacaaagaagtctgataagaaaaggaaatacagaggaagcataaatctctttggaataggattttgttccactcccttagagccctaacagtataccttagaaattattttagacagtttgtacttaaagaccagaaagctactttagagacttggaaataatgagcctattgtcaaaaggtggtgcttgcggggcattaggactagagggttggtgaaaattcagacagaatgtaacttgacaaagagaagacagcaacaactgtaacaattatcttatgaatatttgcgaaactcaaagggatctgattggtgacctctgggctttatcaaattaacatcacaacttctagaagaaagtcaaccttcatcttttacaatagaaatcatatgttttgctaacccattcctatttaggctgaaaacaattaagagttatgggtacttaaaaaaatcattatgtttataaaattagtgatagaaggagcatagtgttctatacagtcacacacatacacttccttatttcttttatttaaactttgagtaacatagcagtctatgtttgggtcagttttcccttttttgtaattacattcagtggtttttgtaacttcattatttattgggaattagtgatttagtcagtgggagttttgtaaaacttaagattttggcttttttccccctcctcctggataaccagttaacccaataatggcttggccgatggaagggtaaaatgaggacagttatattttttaaatgtcattactgtcaccaaatcacacatatcattttctaagataaggaaatacaaccatttttacaagttgcaaaaaagtactctggcttggcaagtttatagactctcattttcttgataaactaaaaaaaaaaaagaaattgctacaagctgctatagacaaaaatgttggtgtctttctgacttttcctgaagacaccttgatggaattatattctcttgattttgtcctttttaaaatgatggttgaaattttaagcctgtcacacactattatttatataatgcctcaaactggcttggatagttttcgtcaactgaattaattttgttaaaaagtgattttagcaattttaggtgccatgtggacatcaccaaatactgtgttagtggaatagcatccaagccatcccaccatctttcctgctgggcaaatccactgctggtgcatttccagtgtgtgcgattatgggttacatgaccaccatttgagaaggtctcctaatgtgctgatcttgttattagctgttatacagtgttttcctttcgtcaaaatgactggagcaaagaggttattctttgaatggttttctcagacagggtatgtgaagccattcactacagtaaaataaaaataataataactcatagaactatgagaattcatcagctatggtctgcttagtcctatgattttgaacaaatcaaaacttctttggaccacaattttcctagctgaaaaattaaacatttggatcatttgatttctcatatcccttttagaatatcagtggcctgtttccttggtgcctttcttttctaccttccctccccatgtgtatctgcccttaaagtagaaagatatgttgacagctattggtgaggaaaatagacaattatgtctcccaactgatattcttctcacagtccaggcaactcctagtagtacaacggaagaaacagctacccagaaggaacagtggtttggcaacagatggcatgagggatatcgccaaacacccagagaagactcccattcgacaacagggacagctggtaatggatggtttaacaagtaaatttggatggaaacttccttttgggttaaacggtagacattgaggacattgaacaaaaggacactggaggaattgtcacgagatgttaggttacttaataaattatgctgcagttcacacagagccaaaccttaaaggctcataacaagtcacctgaacaggaatggatacaagccagttatgaataagaacaggaaacacagagaaaatgcccttgaacatgtctctttcacatcgagttttgggcatcatctagtgagattgtagcagaggccctgataaaatatcgctgtctgttgtataaaggaatctactctataatgtgggtccagactttacaatatgattctgcaaagtctggctgtgagaaagcattttgtcagaactccagtgtttgaagaaatagagccagacattatgtgaaaagtgacacctgtctgatgtcatttggccttttggccatgcctgttcagtaatttgtttttgagtataaaaaaggtatcttctctattcttgaattgtgagattgtggaaattggaatccagtcttatcatcatctctaagtgataccagataacttggctttgcaagctcccatgcaggattcttttgtctgtgtgacataagtattaaaatgtgtcctgccttataaagaatgtgaattccatattctcacttggtatcagtgagaaatattcccatatttctatttgcaacatagaagataatgcatcatgtccttctggggcatggcaagttctaaatgaattcctggcagagcaatggattctgtgattgtctatgtggtgtagttgttgctaagaggatgctattgtaatcttttctacctatacttcttcattggctcagaatgaagcaaggcatgtgctgctttcttatatgtcatttatgccataaatcccattgttagaaggtaatgcttctaacggattccattcatgcttttgagataaatggcattgactttcatattgatcacatggaaagctgttacctgattcctttcctgagatcacttccagcctaatgtgcatttggctggaatatggttgtctcagaataacatcatgcactcgggcttttatacttctgcctttaggggactgtggcagcatggcatgggtcaagaagtacttctccttcatcttcctttgatgtcggtaactcatcctttctgcactgcgggagttgttaatgcttttgtgtcctccagttcacatgctgattgctaagaagaaaatgagcatgagtgaacccaaagctgctgaaacattctgcgtttatgcaacttccttgccctctatacaaggaagatggtttcattgtcttgtctagagaataaagtcttttttaaaaataaaatcggtgtatccctgaccaagcgtccattaacactttgacaattgctcaaactgcatggtcacagcagcctcagctcataccagccatccaatgcaaggaaggacaacaccaagcccagaggacagttcctggactgatttcttcaacccaatctcacaccccatgggacgaggtcatcaagcaggaagaaggatgggtaatagcctctgagatttttatatattatgttttttgaaatccactgagtgactgctgactatttttctagaaatatgcccttggttttagaccaaactactttcctgaaggacctgaggttcttcaaaaattagttttcttggtaggagtgatactcatattcacctgaatatgaagttctgagctgaaagtaaggaatttagcaggagggttggcaaaagaaaaaacttattgtcaaaatatatctgtgtgaggcagtaagtaatagatatgaaatgaatgttgccaacaataaacgctaaagaaattctgagaacccctccctgcccaccacagcatcacagaaaggtgaattggacttggtttatgaaaaataaaaaaaccctggatagtcagagaaaggaagtgggtggtgggggttggtggggggggcagttttcctaagaaggagactcctgtaaggagaaacgtgaaggaagaaaagccaaggaatgaatatgtcagtgagtggatccatttttcacaagggaagatgtgtttgaatggctaggcaggggccattatgttgagtgactgaagtaccacaggcagacccagcacacatgagtttgcacatggcagctggagctctgaggacacccatgggggaaaaccaagccaggcaaagatcttcagaatcaatattaattctatgtactgatgaagagaaagagattccattaaattaatgaacatgtcaaggacaatacaattggcttcaactacacaatggtatgatgactcttgaaggactctacttataagagggaagatgaacaagagtctagagcccatcatcaagtgggactttttctgggagaatgtccatttgtggttttgattcaggttagcacttgctcttgtttgaaatctgggataacagggtcaccacatttttgtcctacaaagatctttaatattttagtgttgaatatttagtgttgaatcttgaatatttagtgttgaaaggctgcagtgcagacctgggtacccagtattctggtgcttcactgggactgattaaatctcccccagaggcagtgatgtggatagactttgactgaattgacagccagaaatatcgatggggtttatgaattgtttggcctctgtttcactcaagacttcttatttcagcagagtagatctgtgataactgttaaaaacaacatttacaagtatttcagtgaaatttctgcactactcaacattgtacatgttaaattttaaagaccgcttatacttgggtttttgggaagaataattcaatgacgtccactgcttcttatttcttgcccctgtatactttctgtaactccacctaggtggtcttggatgacgattctgtttatttgcatattcactttgtgaagaaaaaaagactaaaggggggaagagggctatttttaaaagtccctttggttggtaagggggaggggataaaatggtgcctgagccagcacactttgtcttttctccatgtgtcagattgcatgtttctataaaaaaggcaatgtttctgtctctctgcaagatttgggtgttccatcatgcactcatgtggagtccttccagactcagcaaaaacaaacacacagcatagctttcatataactcggcccttcaaggaaagccagttacttgttgtggtgctctttgatgaaacaataatctatctcagttcgggagatatagtcagtatgtgctttctttcctcttggccagatgtgaatatttaaaaaaatcagctgtagaccataagccaccttcaggtagtggtttgggaaatcaagcaataacactaatattgattccttcagatatggactccagtcatagtataacgcttcagcctactgcaaatccaaacacaggtttggtggaagatttggacaggacaggacctctttcaatgacaacgcgtaagaataacgatgctcagccactttattgacttgtattcctgcttcatctcttactcgctattggccaagatgcagagctttggtggtggaatggtgctatgtggcttacttcagcccagagtgtgaaactgtcttcattgtctgtatttcttgtggaggtctctcaacctgattttcccttcatttctttgtgccttccagatttaatgactttgtgttttaagaaaaagtaggactctattcaactccattttcattctctaagtagttatgtcagtgaaacacatgcccacttccaggatagtgatttctctatgttttaactgaccatttcctttcaatgtccatctttcctccagccagtgcagaagaggggtaggattgcttgcatggttgtaaaaagacatttttggggccagataatcctagagatcacatcagttctcagaggagaggcaaggcatgttattgacaatcaacaaaggtggcgggatccctggaacaacaacaacaacaaaacattgctagtatctctttctatcactaagaaatgttcaaattctagtagccttaatttctactctatgtgcagggatgtcctagagatcagcctaaagtcgttcataatttctttgaggaatacaaaagaaatctagaattaagaaggtcccattttactgcttgccacacataatgggcagagtccttcatatgagccctttaggcaaaggaaaaaaatcagcaagcatgtattgatggtcagcaatgtaaatagcacagcgttaagcatcaaaggagatgcaaataagcctatgaatggtccttgccaaagaaggacttatatttccattttatgtcactgttggcttttgttctgacattgggtttgggatttagtgactgtctttctcctggttgtaatatttattcggtggtgggcatggcttatgggtgtgctttatgaagtttttgcacctgcaactcaggtcagtacctttcttaaaagaacacaaaagaaataaacttgaaacagtccaagtgattttagatatgggcaatgggtcaacctccagttgatatatgtcactgagggccctgtgtttgcccaggcaagcgtttccttggtgcagtgatgaaaatcccaatgcacaggtgaaattaagaaataacttaataatggagtaaaatggtaactttaatttaatgacctttacaaggtagctaagtatttccttgtataaatttgatctgtgttacttgagtaggctattctagataggcttctttttcttttgtggttacaactagactacaggctatcatagtgttcattttccctgccgtcacatttcttgacacacagttaggtgcttttggttactgataggagcattgggattcaaatattcttttttccatgtctctgtgttctctggttttctggagtgactgggagcaatgctgcaattgagcctggacaatccaggataggcaaagttttggctcagtcttcaccttgccactttacctttgatgattatactgagaaataaagggtcttcagaaccaaataggggcaaaatagaattcttctgtatatttctatcaatcagaggagaattgtgtgcacaaaccttggtcttcctatgcacctatccatctgactctactctagctagattttccttgctagcagataacaggatttgtaccgtagcttcaaattaacactggattcattcctcattgaaacagagcagagtaattctcagagcttctctacatcacatgaaggcttggaagaagataaagaccatccaacaacttctactctgacatcaagcagtaaggattataaaacctagttggcttcagctattgataagaatcaatcaattatgggtacttttgcagtgtctttggtggaggtgcatccattagctgccgttacactgttacttttaatcaaaaggtgcgtctggtggtggttctctgatttttctgttttatatacctcttcgtacattaagtgcaaactacatttcttcatcttaaaagttgggtttctttcactctagagttagtgatttgttttaacaataatggattgcttatatatgatttattttatttatttatttttgttaacttgagatctttctaacttttttatgtgggcgtttaaatttagtgctataaatttccctcttactactgccttagctgtgtcccagagattctgatatgttgtatctttgttcttattagtttcaaagaacttcttgatttctgcattaatttcattatttacccagaagtcattcaggagcaggttatttaatttccatgtaattgtatggttttgagtgagtttcttagtcttgatttcaaatttgattgcgctgtggtccaatagactgtttgctatgatttcagttcttttgcagtgtgatttataattggcgtaaatgtctgattatatcactttacattcctcacaataatattgttttgccttttgtcctctggacctccatggtgctgatgactaaaaagcagtcccttctggaaaagaaaagaataattaaattagtagcctcaggcctttgaaaccatgcatttgctattttaattgcaggcagcaaaattttatctttcaatccaatgatatgtttcctccactacatcaaagatgaatccaattgagaaagaactcaagattatctagtacctcagctgacttcaagatcacagttgtagtgacatagccttacctaataacccaagcagatgttgcaacaaatgccaattctgggtattaagatcaccaaaatctcttctgttgagtgatgtccaagtagtgtctattgcaaaatatttattctgttcaatagtatgacaaacttcactctatttctccctatttatggataacaagtggaaagcttttgcagcaattgtgtgttctggagacaagcacatggtgggtggtgatcttacaaatacgggttcatcactgattccacctccacacagataggaatgatgtcacaggtggaagaagagacccaaatcattctgaaggctcaactactttactggaaggttatacctctcattacccacacacgaaggaaagcaggaccttcatcccagtgacctcagctaagactgggtcctttggagttactgcagttactgttggagattccaactctaatgtcaatcgttccttatcaggtaatttggcatttattatctagtttgctttctctatatagagaaacaatatatagtttcatattacagaggacattttctgtgtagtctgggattggactagtttgtgatatggaaatatctttcattattggttatcaattctagtgcaaataaacttgggtatattttagataaaagaatgcttccttttgccagtgttttttccatttgtctgtgtttgcatgtgtgtgtgtgtgtgtgtgtgtgtgtgtgttgtgtgtacaagttggctgttatgatggaattgctttctttgtcttatcttgtgatatatgaagttgaaccacatgaaactgatatttttgcaggtgaaagtagtcgaattttagcaattccgtttaattcgactaatatactctacttattttgtaaggttttatcctacaggtgaataatttctatatactagtatctttgctctgaaattattatcttgttttggtaatagattgatcagttttacttttggtgatggataaacctcttctagttctgatgcacacttaaaatgttcatgatttaatctagtattaatgaatagggaccacttctcttattgtaatagtgaagagaggaacgaagataatttattcaatgaagtttgacacggacctagaataagtctttttttttctcaaataagtagtcatctctgcttctgcttttctttgcttctccatttgtattaagaaattaacagtgaagaaaggggaaatggaaaacgcccactgtagtgaagaaataaaaaacagattctgtcttcctagtactagtttttcaattgctttgtaacacaatcactaggcatattcaagattagagactttagatacataattttggagcagagatcttctctcctccccccaaaaaagaaaaagaagaattcatatgtgtgcatatatatataatttttttttttgagacggagtttcactcttgttgcccaggctggagtccaatggtgcgatcttggctcacctcaacctccgcctcctgagttcaagcaattctcctgcctcagcctccatgagaatccaatatgtaaaacagatgacggttgtgatgcagggacagaaaattcagaatgccacatgcttggcctcatttctctgggtggcctacccaagagcttcaagaaaaacagtttaagaaaatgctaacttcagcaatattggcaagacaaagccccttacactccttagttctttattcagcattgttctgctctcatttattaaaaattccaagtaccattgtcagtattcttcagaaaatcttatagtgctgtctcatttctcttggcaaaagaaagcctgttgtgcaacccaatgaatttaattttttttttttaaagagtcttgccctgtcacccacactgtagtacagtggcgcgatctcggctcactgcaacctctgcctcccgggttcaagcgattctcttgcctcagcctcctgagtagctgggattacagatgtgtgccaccacgcccggctaatttttttatttttagtagaaatggggtttcaccatgttggccaggctggtctcgaactcctgacctcaagtgatccaccagcctcagcctcccaaagtgctaggattacagacgtgagccaccacgcccagccatgaatttaaagtttaaatggcaattttaatagtcacagtaccctagaatgcttatagcctaatgttagtaaatcaaatgctttttacaagactgatattcacagacactgattctttctgatttccacagtggtacggacagattttccataattctccatggattagacaattaagtcacccaattctcatccttggttttcttcaaaaacactcacccacataaatctcatttatgtctatacatttttctcagtctttacgcttaatgttaagaactaaagcatttgttgaagcaagcggatcacttgaggtcaggagtctgagaccagcctggccaacatggcgaaacctcgtctctactaaaaatacaaaatattagccaggcatggtggcaggtgcctgtagtctcacctactcaggagactaaggcatgaaaatcacttgaacccaggaattggaggttgcagtgagccgagatcgtgccactgcactccagcctgggcgacagaacgaggctccgtcccccaaaaaagaactgaagcatttagaatcatagtggcagtggtggtggtggtgatggtgatggtgatggtgataatgatggtgatgggatggtgacggtcatggtgattttggtagtgggagtattggtgtggcatttcagcaaatgttgttttcatttgttttaaccatcagccaaggaacaaagcaatctgtctcttcaatatagttacacaggtgactaagtgtcacccgcttccaccttctctaatcaaggaaatggtgacgatcaggttactatagattccttataaggtgccttcataatggataactgtagccattttatgtaagcattgtcctgtgattaaaaaaaaaaaaagattccagtatgcttttgaaaaatgtgggtgggggagagagttttaatatgctgcattcaagatttgacctatggatttagattctagcaattcatgaggttgtcttaatctaaagctttctggtgatagatgtttgagaagctaggattatattaactagtcatgttgaaactacagatttaactttaaaaaattattttaaacttactataatacccatattccaatacacattattaatgttagctatcatctcaccatttccttttttacttattttcaattttttttgaaaataagtagttgacctttctctttgaatctttacatcattcaatcccaagattccttattgcatactaatttcctgccgccaagaaatctctgtttcatgccctaagccagagtatgcccatttgcagtgattatgtttctcataatccaattcatattgtccttatttaaaatgtacaatgtctagtctcaacctcatacctgcaaagatatcacaatatttttgttagcatgttccttaccacagttcttggatttctaccaaaacaaagtttctacaaaacttcctgtggtcatccttcttagcctttgctgccccagtttccttaattcttattaaagttctagctcatttatcagtggattaagcaatgaacggtaattaacattgtggacccattcaaggctgttttgccatcattttttggaataccttaaaaagactaaactttgtgataggctgtataagaatgcaaaggtaaagaaatgcagatgggagtgtaagtgaaaacatgcagtactgaccttcctgattgctcattacaggagaccaagacacattccaccccagtggggggtcccataccactcatggatctgaatcagatggtgagttcaaaactgctttagtcatttactgttataatcattgagcctaatgatgactaccaacgaagtatgagtcagtgtctccagagaagtggttctcaaaccttcttagcatacatcacaattgcagggagggcttattaaaccacaatgctggaccccacccttaaggttcctgattcagtaggtctggggtggagcccaagcatttgcatttctaatcagttccctggtaatactgacactgctgggacagggattgcactttgagagctactgctctggaggaaagccttgcatctgaaagcctcaggaagaattcaagcagtgtcccaatttaacattgcactacaccagagtgattaagagcttgagctttgtagcaaaaatggcctgagttcgattccagccctccgcatattaactgagcaagatgctttaaagggtctgagacaacatttctcaactaataaacttggaataataacaattgtcacaggacattgtttcaaagactaaatgatagaatacatgtaaagcatttagcataatcctggcacatgatatcatcactggtatttgttgggaatttactgtgtgccagcagcatctttctaaacactttacatgtattaggttgggccaaatggaactgccattattgtaggtcaagaacaggtcaatatcggccaggcacggtggctcacacctgtaatcccagcactttaggaggccgaggcaggtggatcacgaggtcaggagttcgagaccagcctggccaaccctgtctctactaaaaatacaaaaattagccgggcgtggtcctgcgcacctgtaatcccagctactcaggaggctgaggcaggagaattgctcggacctggcaggcagagtttgcagtgagccaagattgcaccactgcactccagcctgggtgacagagcaagactctgtctcaaaaaaaaccaaaaaacaaaaaacaaaaaaacaggttaatatcagcaaattcatagagtttatctagtatgaactcattcagtcatcctataaactctgtgacataggtaagtactattattatccccatgttacagatgaggaaactaaggctcagagaaggtaagtaacttggcagagttgacaggaccagagagtgatggagccacctttcaagcctggagggccttgtattacttctcatagcacagtctggagaaggcattccataatgaccataattactcccaggcatgaattcttaaatagactcctgtttgttgtgattcagatcacacccctacaaaccttaccccagactgcaaaagtctgacatgaggtaggtttactaattacttctactgctgggctactgggaggttctgccagtgctgccttactgtggtctccctgaacatcataaatccaggtgaccccatgtaaatgatttaagccatatcaattattgtctcccctttttatgcccaagtttgagtgaggctcaccatcagatttaaatgtttacacattgaaaacaaatatgaagatggatatttacatggtggcttccacaataactctctatggaggagcactaggaggtagggattcattagaaatgcttctgaaatagagacagaagtcacaggttcactggggactttaggcagggcacttaacctttcccagactcagtttccttgttagtaaaaaggagatcaaatcatctgcctcagttgcttcctagagttattgtgaggaagacagggtaccagaagtgtgaaagtactctgaaaaagtagggagttattattaaggggcatgatctctaaaaccaagagaccccagccactctctaagtatgattctttaaccatcagagtggacatcacctaggaacttgttggaaatgcagaatccttggccaacccagacctactgaatcaggatctgcattttaactacactctcccacccaggtggtttatatgcacattaaagtttggaagcttagactgtgctagactgcttttctcaccattgaagccaattgaacaatctctgtgcatatgtctcagattacatgtcatctcccaacaggaatatcaagtgctcctctttgtggaacttgctactgtggccagtcctaccctggctggatttgtagacatctagggcacaaggcaagacctgctatctcacatccatcttctgtggcttttgcttgaagtgagaatcaagcagacaggagccagtctcttttgtttggcttctgagcaggtgtctattgttcaaacaggaggtttcatcttgctgcacgcacacccagatcttttcttgctgggagcacttcttctttttttttttttttaaatcaaaataaagtgattatgatccgttaatggcctctttttaaatatcaaaggcttctatgagtcagaaaagaaaaaaaaaaaaaagaacagtgagagtgactgtacctcctggggagttttcacggccaaagatcttcagtttaggtggccagtgtcccatgagttgggcaggtgaaaacctgccaaccaccaaggacactggaaggcatgtagggaaagggccttggactgttttggagatttgtaaagtcaaaggccactgtcaacataggataggggatgttgaaacacccagatgtctggtaggaactggttttgctcccttttaagttttaacaaaagcatcaaattgcataaacaagagccatcctgtccccatataaccattgtaatcaagatttcagtgtgcacagcctaaagtttggctccatgaggaaagctctcatttaagaccccaccattttcatccattgatcagccttcaggattctacagtgggcttccatttggtaggaaaaaaaaagttcattttggtggaacactttcaaattttgttttgaagcaatggaggaagaatttttaaaaattcatgaagctttcattttgatgaggctcttcacaagatgtcttagaagtttcttttttaaaaaaattgtttatttatttattatttttatttttaacagggacaggatctccctatgtttcccaggctggtctcaaagtcctggactcaagagatcctcctgtctcagcctcccaaagtgctgggattacaggtgtgagccaccatgcccggcttcttagaagtttcttttagaaccattgtgtctccctcatttcgataggcctccagttctgacttgaggattgtctgtcttgcgatacttcctcccagtttaaggcattttgttcatctccttattttgctttttagcagtagaaaatgttgattcttctaacaaggtgtgtttcagtaatatattagcagggactctaatagggtgatttttcatagtcagaaagggccactgccgctaaactccttatttatttattgtgaggtggagtctcgctctgttgccaagctgtaatgcagaggcacaatctcagctcactgcaacctctgcttcctgggttcaagcaattctcctgcctcagcctcccgagtagctgggactacaggcacatgccactatgcctggctaatttttgtatttttagtagagacggggtttcaccatgttgactaggttgatctcaatctcttgaccttgtgatccgcctgcttcagcctcccaaagtactgggattacaggcgtgagcaaactccttattttatagtgtttatgttggctcctatgatgctattggatgagattttcaggttccctttgggctttctggagcgtgtgagtcccctgggggtcttgttaaaatgaagattctgatttggtagctttgagatgaggcataagattctgcatttctagcgatctccccaggtatgcctgtcctgatggtctgagagccacactttgagtagcaaggtcctaaattaaaaatagaaaataacaaccacacacaactaccaataccgtgtatttcttcaaatctctgcaaaattatgatgaacagcattctgttatccccatcttacgagtgtgaaaagggagacttggagaaggtagattgacccagcacacatggctagttagcaagggacagcggtgagacttaaatccagggttgtccagctctagacaccaaagtcctgaacactgtgcaacactgctgctgagaattctcatgttccttgacacaaaataacattactaagccttagccttaatcaaatgaggtgggggggaaatcttttgtgtaatgctttataaacatctgcagcttgaatccataaatggcttctcagtgattcagaatgtggagagctgccctttatgcagctccacaaggaactcatggttacacatttcaaactttggttgagagatgttgtttttccccttaggacactcacatgggagtcaagaaggtggagcaaacacaacctctggtcctataaggacaccccaaattccaggtgagtttcaaactttgaggcagaaaaacacactgaaagcagctttctcagaatgtcccagcaaggacgaagagactcatttgaaagcacattctccacaatgcccaacatatgaatccaattgctcctctttacaagttaaaggatgaatgagaatactacaccctcttggtaggaaaagatggaatagtcttttcttcctgggttctgcaaactagctgagctcatactcagatctgtccctggcctgtcccagagaagtgccatgttagttactaaagcttccttcctaaatgaatgatcaccaagaggaccccatgtcatacctaggtcctttctatcccaatccaatttccacttatttctggggtccaaggtgaagcatgtaattttccttttacgattacagacagggaggagctacaagaggcatttatgttagatggagtgaaaactttcttttggttccccaactaatttttttttggtcgagggaccgcctgctgatgtggacagaataaacttttcagaaagtatgcatgtgcagtgaggaggctgggacacctggttctcctgagcatcaagacaaggcatttgttgcaaattctttatttgacttggaattaaaattgatttgtcatagagaattactaaagggaagggttctcctaaggttgtaaattacccttttaattctctcctcttcagaggtctccagactgagcctctcttggggaaagagaagaatgtggcatgcaccgttctcctttgccccagcttgcctaagcacacctgaagacagaccagacagagacaggggtgggctgtcccaagggagagcacaggggaagccttagctgtcatcaggcagcaagattcttcccagctccagtgacagtgcaggtgggatatctcagggctggaaaccagggccacagtgggcaggagtagaaaggaagaacagaaatcgggccctcctgtcagtctcccccacttctgactctacctccctctccaaactcatctaaaccaggaaaaggtgaggcaaaggtagtgctgagcaggaaatcagagataaaccaaaatttccaagaagaaaacagataatgagactttccatgcctcttctttctcaagccctggttcattgcacacatatacaacccactttgcaactgaatttagtggagttgtcaagtcatattttagtcctaaaagagcctgatttcaaaatgtgtagaatattaatccacaagtgatatataattattgaaaacatttgaaaaaatacaactaaataaaataatggaaatataaatcaattattatcaatctcaccatccagaaataccatggttaccattttaatatacgtcttttttttttttttttttttgagatggagttttgctttgttgcccaggctggagtgcagtggcgcgacctcggcccactgcaacctctgcttcctgagttcaagcgattctcctgcctcagcctcctgagtagctgagattacagcatgccaccatgcccagctaatttttgtagttttagagatggggtttcaccatgttggtcaggctggtctcaaactcctgacctcgtgattcacccacttcagcctcctaaagtgctgggattacaggcgtgagccaccgcacccggcctttcctgtcattttaaaatgtaaaatatataccaaaatgtgattacaccttacatggtgtttagcaaacattgcctactggttaaccatggcttccatgtcattgaatatttcctcctcatattgtagtgcgtaatgcaatagatgtaccctaatttatttaaccaatcctttattgcctccatttttgttttttaatacaatgtaaggtggataggtggatgctcttatacaggaaaaaaatgttcctttcaaaagaagcctacatttccttttatatgtttaataatattataccaaagacatctacaagattcaacaagtcatcctgtccttttttagaaacatagttctcctgaagggacttgaaaatcctgactgatgataaaagattaaagcaagaaggctgttggacaaataccttcagcaaattgctcttccagaattacctgcctattggctggacctattggccagacccccctgcagcgctgactgtggtgcttgtttcaactaggtcaattataaagtgcatttttgtttttacaaagtgtgtctctgaagctcacgcatgtcatttaatttactcataccagaatggctgatcatcttggcatccctcttggccttggctttgattcttgcagtttgcattgcagtcaacagtcgaagaaggtaaggggctgtcctgggggctttcaacttggaaagggcatcatttaaacctgggctttatatccttgctgctcagagcgtagtccctggaaccagcagcctgggtaccctgggagtttgttggaaatgcacaatctcagacccaaccccagacctcctatggcagagtctgcatcttaacaagtttccagggattcatgtgcatggtgcagcttaagacatctttctctgccccggtttttagagacaggagacacctgtgattgtttggctcatcacttttaggtagtggttgaatcctttgtgattttacatgttttttagggttaaacctcatgcagactctgtctgatgaaagttatgaagtatctcaccaggaaggcacacaaaagtatatactcattcattgatttgttaaatatttattaaatacattcacaatgcacaaatatcgtataaagattcagtgattcatcatcccctgtagcctctctgaggcccagggaacctttaagaacttttaccagaaggaagtattggccttgtgcttttgtttgtcgtttgtttttttattggccttgtgcttttgtttgttgtttggtttttgtaatgatatcattttctattttctgggaactgtagttgaagagattcaggttatagcataagaagagcactgtttcatcgtcttcttgctgttaggaggtctatgaagcagagaagaactttcctttggaaaacaactaaatgaagacagtcacctcgctagaactgacacatgggctgtttttatattcttgaaggccactctctccctacctgaaccaagacctataggtttacatgttatttacattttatatataatatatatatatatatatacacatacattatatatacacaatagtaattctagcaacagaggaaatgacctttaacaggggtataaatctaaatttataaaagtataaatctaaatttcttacccaagacactttaaagatacattatttttctccaggacgtaattcataggaatattaagccttttgtaaatgtccctttagatggtttctcataaggtaaaagaaacttatttccaagcaggaccacctttattgtgtccccagatcacctcacagggcagaaaaatgcccctcagtctgggagaagacctagagagaattatggactccttactggtttttggaaagcaaccaacagctaattccaacaccatgggcagcccatacagtctctaattatctgagaaaatcaaatgatgctgttacaataattacgctggtacaagttaataaaagtgccatgttacagtcaaacagctatgttgctatctataccattgagggcatagttttaaaaagtagttatgctacctgattgtataaggaacaaaactgagagaaaaaatctaaaaggccgcctatgattgaatggaaagattttttttagttgaatttaaataatgtgacttgggggagcctttacaaagagtctttatacctcccttcagcttcctcattttcccttggattacttttgctcaattaaatatgaatttcctattgtgtgcaatcagccctttattgccaagccctagaatgcaccacttttgctcacatacacagtccataagctttgcacatgtcaccatagaaacgctggcatggatgctgtcgacatttagggagacctcggagaagcatctcagctgtccctaagagcagctggagtccatacattggggctgggtatctcccccatcgtctgtgtcttgtcagcagcagacagcagagaaggggcctcattgctgccctctccctcctcccaagaccagcagtcaccctggcaaccggcaaacagggacacacagggtccggcacagcgagtatctcaccaggaaagtagctgcttggatgccataaattactatgtcctgatttgataattgaaaacagatttgccacgcagctaaaaggtggtgaacagctgtacgggccccttaatgggctctgtgattctaaagctgtcaacccatttctaatccccttcaaaggctgaggcttttctgctttgagtgtcacatttaagagaaagagatacagaatcctattttcatcagagaaagtttggttgaaaatggggcctccaataggtgttcatttattcagcaaacatcttttgagtggctcctgtgactaccagccctggcaaggagaaagagaaggtaaaaaacaaaaagagtaccaccccttttctaaaagaatcttgaggtttagtggcagtattggcctcttgaatttgaattggctaatatttattgagaacattccctgtgccagacactgttatataaattatggttaaaagacaaaagtggaaaatcattagtctctgaagttgacatacaaggatgggtcatgggcttgcatgatgaagtgatctgtgagtcacgttgtcttaaagatgctgggttgggggttctattacttctttaggtttttccacccctgccatcatccaaaacagctttctttgctgttcctcatgtcacctgactccttgagttacagctctccaagagaaatcatattttattcccttttcatgagagcacataattattttaggagtcagttgggttgatagatactgcgtgaggctccagagaagattttcctttaaagaatctatctgggccaggtgcagtggctcactccatgtgcagtggctcactttgggaggccgaggcagtggattagttgagcctaggagttcaagaccagcctgggcaacatggcgaaaccccatctctacaaaaaacacaaaaattagccgggcatagtggcgcatgcctgtggtctcagctgctcgggaggttgaggtagaagaatcgcttgagccccgggaggtggaggcagcagtgagccatgatagtgccactacagcctgggcaacagagtgagaccctgtctcaaacaaacaagcaaacaaacaaacaaacaaaaacctatcttatttgtctaaagaggagaaaaaaacatgagaactttactatgttgcttgtacataaaagctgttcatcagccttcactttaatgggaataatcgtcttttctataaaccccagcaggcagtcacccacactccaatcagtaggtcttctctacgcatcgccataatttagaaatattttccttctcttatgctacagtctagctcctgcaatctgagctcacccaacctcgtcctgctgtctagaacagtgctatgcaatagaactttctgtgatgatggaaatattctatacctccactgtccaatatataactactagccacaactgagcacttgaactatggctagttcaactgaggaagtgaatttttaatttcatttcattgtaattagtttaaattcaaatagccaaatgtggctggtggctaccatattggatggcacagctctaaaacagtgcaaaataaatccctaaatatcgttaaggattgtcaggtagaagagtcatgagatcagttgccaagttacccacctaaatcttttgagataaattctgccatgccataaaagtatgttacctggcttctaaaccccagccagcctgccctctctttcctggtgaggtctcagtctgcctccttccacactgtgtgattgctgtgtgctcagctaatgcctgagatttaagggaagaggagataaaggtaagacacagatccatgaggatctctgatcttcagagtcagaagatccaagctgtggctgggcgcgggggctcacacctgtaatcccagcactttgggaggctgaggcaggcagatcatttgaggtcaggagtttgagaccagcgtggccaacatggagaaaccctacctctactaaaaacacaaaaattagccaggtgtggtggcgggtgcctgtaatcccagctacttgggtggctgaggcaggagaatttcttgaacccaggaggcagaggttgcagtgagccgagatagtgccattgcaccccagcctggttgatgaagtgagactttgtaaaaaacaaaacaaaacaaacaaacaaacaaacaaacaaaaacagaaaatccaagctgtgattcttgcagtgcagtgccataacaagctgtgaaactttggacaatacttcttggacttggtgtccagtttacataatgaagaagctgggctagatgatctctgaagccccttaaggtctagtgctccttcttaaattcttataactaggaataacttaaaaattagaatttgtctcttaaaagcacttattagacgcctagagcactgaatattggaatgagttatttatgagaatcatcctaccctcctgaaactactcagacagatagaaacacataaatccaaagggaaatgcaggccaaccaaaaaccaagcacaatattcctgtgtcctataggtcaaatgttatccactgtcaagatcagcttcgtttagattaacaacattaatccccacccactcccatgcacagacatattttttatgctcataaatcactttcccacaatatttcattccatccctcaaccacccattggttagggaaatgggaattactttaactagacaactttcctccaaagaacacaggggccagggaattggaagtaacacaagcagtattctaccttgagccttttaaatcctcttcatagtaaataataacgaggtaggtggaggcagccaggagaaacaagcaaaattcatttcatatggcttttgttatattaacaattatagatagcacttgaaagcttactgtgctccagatactgttctaagtgttaacccaaaccttagtttccttaccccgcataagagcaagaataacaattatttccttacccctcataagagcaagaataataacaatagactcatttatttagtgacagtctctgtttcaagggcttttcacaatcctatgatattgctactcttagtaacctggtattattgatgcaaaactgaggctcagagaggttaagtgagttgccccaggtcacatagcagtaagttctcaaaaccaggccttccgagccccttttcttctttcttttttccttttttttttttttttttttttgagacggagtcttactgtgtcacccaggctggagtgcggtgatgcaatctcagcttactgcaacctccacctcccaggttcaagcaattctcctgcttcagtctcctgagtagttgggattcagccacgcaccaccatgcccccatgaccggctaatttttgtatttttggtagagatggggtttcaccatgttggccagctggtctcgaactcctgacctcaagtgatccttctgcctcagcctcccaagtgttgggattacaggcatgagccattgtgcctggtctctttttcttttttgaaacagggtctcactctgtcacccaggctggaatgcagtggcacaaacacagctcactgcagcctcgacttcctgggctcaagtaattctcccacctcagcccccaaagtaactaagactacaggcacatgccaccacagccggcttatctttgtattttgaatacagactgggttttaccatgttgcccaggctggtcacaatctcctgggctcaagtgatccacccgccttggcctcccaaagtgctgggattacaggagtgaaccactgcacctggcctccaaggcccttttcttgaccatgcatcctgctggactccatctgtattcctggtccccatgaatctgtttcacagttcaagcatccttcccccaacccctcatcaagccttatgctagaggagacaggatctacctcctgttgaggaggtataatttttatttccccaaacaagagcttaaagtttatggccttggcagtcctacagggaatggtccatgatcatgaataatagaggctttgtcactattactccaaatatccagaggcaaagtgaacaattctgacttcatactgtttccaaatctccagagggctggcagcattgacagagccaggcagagcccaggctttggtcataaaggcctggatttgaatattggctctgtcattcttactttctgtgtgacctcgagcaagttattaaacctcttttggcctcagtttccattgctgtattatgggaacaatagctgctttgaaagagtgttgtaagaattacagaaaattacatgtaaaatgtctggtattcaggaggtaatctgcttccctgaatccccatcttgcttgtagttgtgaagctatgcaactttccttcctctaagcatagtctgactcgtatatgtgtagtagtgatatgttacaggaaagaggaagcattgcattaggctgggtggggtgaagcaatggacagtaaccagggaaaagatcaaggtcgtactcttccatagcaactttcttttgcgtttgggtcttaagtaatgtttgagaaaccttaaattaacgagaataatttgtcttatgttattaaacttcctatatcagggttgtatgagttagccaatgttaggaaaacatcactatggccttatacctctagaaaaatgttgttttattcttctcgatacattcagtaataatgctgacaaggccgacaaagtgttgactgggagaggaagttatgggactttctggaatatacaaatcagaatgatttacaatcatcatgttgatggtttatctaaatctgcagaaactgctaaaatgcttaaaagaggcaaacatttccattgtgaagtaagatagaaagagaatcagaacttgagagtcagacagaccagggtttgaatcctctttcttacttgctgagttacttgggggaagttactgaattttctgatccccaaggtttcttcacttggaatatagagaatataataataacaccggcttcctggagtcttagttgctggtttgcaaacttgactgtgcagagaagcccctgaggggttgcaaatttgactgtgcagagaagccacagatcctgggctccaactctagagttttctgattcagcaggtttggggtggggctgagaatttgtatttctaacaggttccaagatgatgcttttgctgctggtccagggacctcactttgaggagtgctggttgttatgagtctggttgttaagtgctggttgttagttgttaaagtagagaaaacccctagcacagtgcttggcacacactaaagccatcataaaccatagtgatcatcaatgatggtgctcagtaaggatgatgatctgatgcctgagtcactgcaatctttctgatatggtacattttttaaattattaggtgtgggcagaagaaaaagctagtgatcaacagtggcaatggagctgtggaggacagaaagccaagtggactcaacggagaggccagcaagtctcaggaaatggtgcatttggtgaacaaggagtcgtcagaaactccagaccagtttatgacagctgatgagacaaggaacctgcagaatgtggacatgaagattggggtgtaacacctacaccattatcttggaaagaaacaaccgttggaaacataaccattacagggagctgggacacttaacagatgcaatgtgctactgattgtttcattgcgaatcttttttagcataaaattttctactctttttgttttttgtgttttgttctttaaagtcaggtccaatttgtaaaaacagcattgctttctgaaattagggcccaattaataatcagcaagaatttgatcgttccagttcccacttggaggcctttcatccctcgggtgtgctatggatggcttctaacaaaaactacacatatgtattcctgatcgccaacctttcccccaccagctaaggacatttcccagggttaatagggcctggtccctgggaggaaatttgaatgggtccattttgcccttccatagcctaatccctgggcattgctttccactgaggttgggggttggggtgtactagttacacatcttcaacagaccccctctagaaatttttcagatgcttctgggagacacccaaagggtgaagctatttatctgtagtaaactatttatctgtgtttttgaaatattaaaccctggatcagtcctttgatcagtataattttttaaagttactttgtcagaggcacaaaagggtttaaactgattcataataaatatctgtacttcttcgatcttcaccttttgtgctgtgattcttcagtttctaaaccagcactgtctgggtccctacaatgtatcaggaagagctgagaatggtaaggagactcttctaagtcttcatctcagagaccctgagttcccactcagacccactcagccaaatctcatggaagaccaaggagggcagcactgtttttgttttttgttttttgttttttttttttgacactgtccaaaggttttccatcctgtcctggaatcagagttggaagctgaggagcttcagcctcttttatggtttaatggccacctgttctctcctgtgaaaggctttgcaaagtcacattaagtttgcatgacctgttatccctggggccctatttcatagaggctggccctattagtgatttccaaaaacaatatggaagtgccttttgatgtcttacaataagagaagaagccaatggaaatgaaagagattggcaaaggggaaggatgatgccatgtagatcctgtttgacatttttatggctgtatttgtaaacttaaacacaccagtgtctgttcttgatgcagttgctatttaggatgagttaagtgcctggggagtccctcaaaaggttaaagggattcccatcattggaatcttatcaccagataggcaagtttatgaccaaacaagagagtactggctttatcctctaacctcatattttctcccacttggcaagtcctttgtggcatttattcatcagtcagggtgtccgattggtcctagaacttccaaaggctgcttgtcatagaagccattgcatctataaagcaacggctcctgttaaatggtatctcctttctgaggctcctactaaaagtcatttgttacctaaacttatgtgcttaacaggcaatgcttctcagaccacaaagcagaaagaagaagaaaagctcctgactaaatcagggctgggcttagacagagttgatctgtagaatatctttaaaggagagatgtcaactttctgcactattcccagcctctgctcctccctgtctaccctctcccctccctctctccctccacttcaccccacaatcttgaaaaacttcctttctcttctgtgaacatcattggccagatccattttcagtggtctggatttctttttattttcttttcaacttgaaagaaactggacattaggccactatgtgttgttactgccactagtgttcaagtgcctcttgttttcccagagatttcctgggtctgccagaggcccagacaggctcactcaagctctttaactgaaaagcaacaagccactccaggacaaggttcaaaatggttacaacagcctctacctgtcgccccagggagaaaggggtagtgatacaagtctcatagccagagatggttttccactccttctagatattcccaaaaagaggctgagacaggaggttattttcaattttattttggaattaaatacttttttccctttattactgttgtagtccctcacttggatatacctctgttttcacgatagaaataagggaggtctagagcttctattccttggccattgtcaacggagagctggccaagtcttcacaaacccttgcaacattgcctgaagtttatggaataagatgtattctcactcccttgatctcaagggcgtaactctggaagcacagcttgactacacgtcatttttaccaatgattttcaggtgacctgggctaagtcatttaaactgggtctttataaaagtaaaaggccaacatttaattattttgcaaagcaacctaagagctaaagatgtaatttttcttgcaattgtaaatcttttgtgtctcctgaagacttcccttaaaattagctctgagtgaaaaatcaaaagagacaaaagacatcttcgaatccatatttcaagcctggtagaattggcttttctagcagaacctttccaaaagttttatattgagattcataacaacaccaagaattgattttgtagccaacattcattcaatactgttatatcagaggagtaggagagaggaaacatttgacttatctggaaaagcaaaatgtacttaagaataagaataacatggtccattcacctttatgttatagatatgtctttgtgtaaatcatttgttttgagttttcaaagaatagcccattgttcattcttgtgctgtacaatgaccactgttattgttactttgacttttcagagcacacccttcctctggtttttgtatatttattgatggatcaataataatgaggaaagcatgatatgtatattgctgagttgaaagcacttattggaaaatattaaaaggctaacattaaaagactaaaggaaacagactcagaa

SEQ ID NO: 89 - DNA, 5452 bp, Homo Sapiens
gagaagaaagccagtgcgtctctgggcgcaggggccagtggggctcggaggcacaggcaccccgcgacactccaggttccccgacccacgtccctggcagccccgattatttacagcctcagcagagcacggggcgggggcagaggggcccgcccgggagggctgctacttcttaaaacctctgcgggctgcttagtcacagccccccttgcttgggtgtgtccttcgctcgctccctccctccgtcttaggtcactgttttcaacctcgaataaaaactgcagccaacttccgaggcagcctcattgcccagcggaccccagcctctgccaggttcggtccgccatcctcgtcccgtcctccgccggcccctgccccgcgcccagggatcctccagctcctttcgcccgcgccctccgttcgctccggacaccatggacaagttttggtggcacgcagcctggggactctgcctcgtgccgctgagcctggcgcagatcgatttgaatataacctgccgctttgcaggtgtattccacgtggagaaaaatggtcgctacagcatctctcggacggaggccgctgacctctgcaaggctttcaatagcaccttgcccacaatggcccagatggagaaagctctgagcatcggatttgagacctgcaggtatgggttcatagaagggcacgtggtgattccccggatccaccccaactccatctgtgcagcaaacaacacaggggtgtacatcctcacatccaacacctcccagtatgacacatattgcttcaatgcttcagctccacctgaagaagattgtacatcagtcacagacctgcccaatgcctttgatggaccaattaccataactattgttaaccgtgatggcacccgctatgtccagaaaggagaatacagaacgaatcctgaagacatctaccccagcaaccctactgatgatgacgtgagcagcggctcctccagtgaaaggagcagcacttcaggagctttgatgagcactagtgctacagcaactgagacagcaaccaagaggcaagaaacctgggattggttttcatggttgtttctaccatcagagtcaaagaatcatcttcacacaacaacacaaatggctggtacgtcttcaaataccatctcagcaggctgggagccaaatgaagaaaatgaagatgaaagagacagacacctcagtttttctggatcaggcattgatgatgatgaagattttatctccagcaccatttcaaccacaccacgggcttttgaccacacaaaacagaaccaggactggacccagtggaacccaagccattcaaatccggaagtgctacttcagacaaccacaaggatgactgatgtagacagaaatggcaccactgcttatgaaggaaactggaacccagaagcacaccctcccctcattcaccatgagcatcatgaggaagaagagaccccacattctacaagcacaacagcctcagctcataccagccatccaatgcaaggaaggacaacaccaagcccagaggacagttcctggactgatttcttcaacccaatctcacaccccatgggacgaggtcatcaagcaggaagaaggatggatatggactccagtcatagtataacgcttcagcctactgcaaatccaaacacaggtttggtggaagatttggacaggacaggacctctttcaatgacaacgcagcagagtaattctcagagcttctctacatcacatgaaggcttggaagaagataaagaccatccaacaacttctactctgacatcaagcaataggaatgatgtcacaggtggaagaagagacccaaatcattctgaaggctcaactactttactggaaggttatacctctcattacccacacacgaaggaaagcaggaccttcatcccagtgacctcagctaagactgggtcctttggagttactgcagttactgttggagattccaactctaatgtcaatcgttccttatcaggagaccaagacacattccaccccagtggggggtcccataccactcatggatctgaatcagatggacactcacatgggagtcaagaaggtggagcaaacacaacctctggtcctataaggacaccccaaattccagaatggctgatcatcttggcatccctcttggccttggctttgattcttgcagtttgcattgcagtcaacagtcgaagaaggtgtgggcagaagaaaaagctagtgatcaacagtggcaatggagctgtggaggacagaaagccaagtggactcaacggagaggccagcaagtctcaggaaatggtgcatttggtgaacaaggagtcgtcagaaactccagaccagtttatgacagctgatgagacaaggaacctgcagaatgtggacatgaagattggggtgtaacacctacaccattatcttggaaagaaacaaccgttggaaacataaccattacagggagctgggacacttaacagatgcaatgtgctactgattgtttcattgcgaatcttttttagcataaaattttctactctttttgttttttgtgttttgttctttaaagtcaggtccaatttgtaaaaacagcattgctttctgaaattagggcccaattaataatcagcaagaatttgatcgttccagttcccacttggaggcctttcatccctcgggtgtgctatggatggcttctaacaaaaactacacatatgtattcctgatcgccaacctttcccccaccagctaaggacatttcccagggttaatagggcctggtccctgggaggaaatttgaatgggtccattttgcccttccatagcctaatccctgggcattgctttccactgaggttgggggttggggtgtactagttacacatcttcaacagaccccctctagaaatttttcagatgcttctgggagacacccaaagggtgaagctatttatctgtagtaaactatttatctgtgtttttgaaatattaaaccctggatcagtcctttgatcagtataattttttaaagttactttgtcagaggcacaaaagggtttaaactgattcataataaatatctgtacttcttcgatcttcaccttttgtgctgtgattcttcagtttctaaaccagcactgtctgggtccctacaatgtatcaggaagagctgagaatggtaaggagactcttctaagtcttcatctcagagaccctgagttcccactcagacccactcagccaaatctcatggaagaccaaggagggcagcactgtttttgttttttgttttttacactgtccaaaggttttccatcctgtcctggaatcagagttggaagctgaggagcttcagcctcttttatggtttaatggccacctgttctctcctgtgaaaggctttgcaaagtcacattaagtttgcatgacctgttatccctggggccctatttcatagaggctggccctattagtgatttccaaaaacaatatggaagtgccttttgatgtcttacaataagagaagaagccaatggaaatgaaagagattggcaaaggggaaggatgatgccatgtagatcctgtttgacatttttatggctgtatttgtaaacttaaacacaccagtgtctgttcttgatgcagttgctatttaggatgagttaagtgcctggggagtccctcaaaaggttaaagggattcccatcattggaatcttatcaccagataggcaagtttatgaccaaacaagagagtactggctttatcctctaacctcatattttctcccacttggcaagtcctttgtggcatttattcatcagtcagggtgtccgattggtcctagaacttccaaaggctgcttgtcatagaagccattgcatctataaagcaacggctcctgttaaatggtatctcctttctgaggctcctactaaaagtcatttgttacctaaacttatgtgcttaacaggcaatgcttctcagaccacaaagcagaaagaagaagaaaagctcctgactaaatcagggctgggcttagacagagttgatctgtagaatatctttaaaggagagatgtcaactttctgcactattcccagcctctgctcctccctgtctaccctctcccctccctctctccctccacttcaccccacaatctttggtctggatttctttttattttcttttcaacttgaaagaaactggacattaggccactatgtgttgttactgccactagtgttcaagtgcctcttgttttcccagagatttcctgggtctgccagaggcccagacaggctcactcaagctctttaactgaaaagcaacaagccactccaggacaaggttcaaaatggttacaacagcctctacctgtcgccccagggagaaaggggtagtgatacaagtctcatagccagagatggttttccactccttctagatattcccaaaaagaggctgagacaggaggttattttcaattttattttggaattaaatacttttttccctttattactgttgtagtccctcacttggatatacctctgttttcacgatagaaataagggaggtctagagcttctattccttggccattgtcaacggagagctggccaagtcttcacaaacccttgcaacattgcctgaagtttatggaataagatgtattctcactcccttgatctcaagggcgtaactctggaagcacagcttgactacacgtcatttttaccaatgattttcaggtgacctgggctaagtcatttaaactgggtctttataaaagtaaaaggccaacatttaattattttgcaaagcaacctaagagctaaagatgtaatttttcttgcaattgtaaatcttttgtgtctcctgaagacttcccttaaaattagctctgagtgaaaaatcaaaagagacaaaagacatcttcgaatccatatttcaagcctggtagaattggcttttctagcagaacctttccaaaagttttatattgagattcataacaacaccaagaattgattttgtagccaacattcattcaatactgttatatcagaggagtaggagagaggaaacatttgacttatctggaaaagcaaaatgtacttaagaataagaataacatggtccattcacctttatgttatagatatgtctttgtgtaaatcatttgttttgagttttcaaagaatagcccattgttcattcttgtgctgtacaatgaccactgttattgttactttgacttttcagagcacacccttcctctggtttttgtatatttattgatggatcaataataatgaggaaagcatgatatgtatattgctgagttgaaagcacttattggaaaatattaaaaggctaacattaaaagactaaaggaaacagactcagaa

SEQ ID NO: 90 - protein, 668 aa, Homo Sapiens
MDKFWWHAAWGLCLVPLSLAQIDLNITCRFAGVFHVEKNGRYSISRTEAADLCKAFNSTLPTMAQMEKALSIGFETCRYGFIEGHVVIPRIHPNSICAANNTGVYILTSNTSQYDTYCFNASAPPEEDCTSVTDLPNAFDGPITITIVNRDGTRYVQKGEYRTNPEDIYPSNPTDDDVSSGSSSERSSTSGALMSTSATATETATKRQETWDWFSWLFLPSESKNHLHTTTQMAGTSSNTISAGWEPNEENEDERDRHLSFSGSGIDDDEDFISSTISTTPRAFDHTKQNQDWTQWNPSHSNPEVLLQTTTRMTDVDRNGTTAYEGNWNPEAHPPLIHHEHHEEEETPHSTSTTASAHTSHPMQGRTTPSPEDSSWTDFFNPISHPMGRGHQAGRRMDMDSSHSITLQPTANPNTGLVEDLDRTGPLSMTTQQSNSQSFSTSHEGLEEDKDHPTTSTLTSSNRNDVTGGRRDPNHSEGSTTLLEGYTSHYPHTKESRTFIPVTSAKTGSFGVTAVTVGDSNSNVNRSLSGDQDTFHPSGGSHTTHGSESDGHSHGSQEGGANTTSGPIRTPQIPEWLIILASLLALALILAVCIAVNSRRRCGQKKKLVINSGNGAVEDRKPSGLNGEASKSQEMVHLVNKESSETPDQFMTADETRNLQNVDMKIGV

SEQ ID NO: 91 - DNA, 5468 bp, Homo Sapiens
gagaagaaagccagtgcgtctctgggcgcaggggccagtggggctcggaggcacaggcaccccgcgacactccaggttccccgacccacgtccctggcagccccgattatttacagcctcagcagagcacggggcgggggcagaggggcccgcccgggagggctgctacttcttaaaacctctgcgggctgcttagtcacagccccccttgcttgggtgtgtccttcgctcgctccctccctccgtcttaggtcactgttttcaacctcgaataaaaactgcagccaacttccgaggcagcctcattgcccagcggaccccagcctctgccaggttcggtccgccatcctcgtcccgtcctccgccggcccctgccccgcgcccagggatcctccagctcctttcgcccgcgccctccgttcgctccggacaccatggacaagttttggtggcacgcagcctggggactctgcctcgtgccgctgagcctggcgcagatcgatttgaatataacctgccgctttgcaggtgtattccacgtggagaaaaatggtcgctacagcatctctcggacggaggccgctgacctctgcaaggctttcaatagcaccttgcccacaatggcccagatggagaaagctctgagcatcggatttgagacctgcaggtatgggttcatagaagggcacgtggtgattccccggatccaccccaactccatctgtgcagcaaacaacacaggggtgtacatcctcacatccaacacctcccagtatgacacatattgcttcaatgcttcagctccacctgaagaagattgtacatcagtcacagacctgcccaatgcctttgatggaccaattaccataactattgttaaccgtgatggcacccgctatgtccagaaaggagaatacagaacgaatcctgaagacatctaccccagcaaccctactgatgatgacgtgagcagcggctcctccagtgaaaggagcagcacttcaggaggttacatcttttacaccttttctactgtacaccccatcccagacgaagacagtccctggatcaccgacagcacagacagaatccctgctaccactttgatgagcactagtgctacagcaactgagacagcaaccaagaggcaagaaacctgggattggttttcatggttgtttctaccatcagagtcaaagaatcatcttcacacaacaacacaaatggctgcaggctgggagccaaatgaagaaaatgaagatgaaagagacagacacctcagtttttctggatcaggcattgatgatgatgaagattttatctccagcaccatttcaaccacaccacgggcttttgaccacacaaaacagaaccaggactggacccagtggaacccaagccattcaaatccggaagtgctacttcagacaaccacaaggatgactgatgtagacagaaatggcaccactgcttatgaaggaaactggaacccagaagcacaccctcccctcattcaccatgagcatcatgaggaagaagagaccccacattctacaagcacaacagcctcagctcataccagccatccaatgcaaggaaggacaacaccaagcccagaggacagttcctggactgatttcttcaacccaatctcacaccccatgggacgaggtcatcaagcaggaagaaggatggatatggactccagtcatagtataacgcttcagcctactgcaaatccaaacacaggtttggtggaagatttggacaggacaggacctctttcaatgacaacgcagcagagtaattctcagagcttctctacatcacatgaaggcttggaagaagataaagaccatccaacaacttctactctgacatcaagcaataggaatgatgtcacaggtggaagaagagacccaaatcattctgaaggctcaactactttactggaaggttatacctctcattacccacacacgaaggaaagcaggaccttcatcccagtgacctcagctaagactgggtcctttggagttactgcagttactgttggagattccaactctaatgtcaatcgttccttatcaggagaccaagacacattccaccccagtggggggtcccataccactcatggatctgaatcagatggacactcacatgggagtcaagaaggtggagcaaacacaacctctggtcctataaggacaccccaaattccagaatggctgatcatcttggcatccctcttggccttggctttgattcttgcagtttgcattgcagtcaacagtcgaagaaggtgtgggcagaagaaaaagctagtgatcaacagtggcaatggagctgtggaggacagaaagccaagtggactcaacggagaggccagcaagtctcaggaaatggtgcatttggtgaacaaggagtcgtcagaaactccagaccagtttatgacagctgatgagacaaggaacctgcagaatgtggacatgaagattggggtgtaacacctacaccattatcttggaaagaaacaaccgttggaaacataaccattacagggagctgggacacttaacagatgcaatgtgctactgattgtttcattgcgaatcttttttagcataaaattttctactctttttgttttttgtgttttgttctttaaagtcaggtccaatttgtaaaaacagcattgctttctgaaattagggcccaattaataatcagcaagaatttgatcgttccagttcccacttggaggcctttcatccctcgggtgtgctatggatggcttctaagacatttcccagggttaatagggcctggtccctgggaggaaatttgaatgggtccattttgcccttccatagcctaatccctgggcattgctttccactgaggttgggggttggggtgtactagttacacatcttcaacagaccccctctagaaatttttcagatgcttctgggagacacccaaagggtgaagctatttatctgtagtaaactatttatctgtgtttttgaaatattaaaccctggatcagtcctttgatcagtataattttttaaagttactttgtcagaggcacaaaagggtttaaactgattcataataaatatctgtacttcttcgatcttcaccttttgtgctgtgattcttcagtttctaaaccagcactgtctgggtccctacaatgtatcaggaagagctgagaatggtaaggagactcttctaagtcttcatctcagagaccctgagttcccactcagacccactcagccaaatctcatggaagaccaaggagggcagcactgtttttgttttttgttttttacactgtccaaaggttttccatcctgtcctggaatcagagttggaagctgaggagcttcagcctcttttatggtttaatggccacctgttctctcctgtgaaaggctttgcaaagtcacattaagtttgcatgacctgttatccctggggccctatttcatagaggctggccctattagtgatttccaaaaacaatatggaagtgccttttgatgtcttacaataagagaagaagccaatggaaatgaaagagattggcaaaggggaaggatgatgccatgtagatcctgtttgacatttttatggctgtatttgtaaacttaaacacaccagtgtctgttcttgatgcagttgctatttaggatgagttaagtgcctggggagtccctcaaaaggttaaagggattcccatcattggaatcttatcaccagataggcaagtttatgaccaaacaagagagtactggctttatcctctaacctcatattttctcccacttggcaagtcctttgtggcatttattcatcagtcagggtgtccgattggtcctagaacttccaaaggctgcttgtcatagaagccattgcatctataaagcaacggctcctgttaaatggtatctcctttctgaggctcctactaaaagtcatttgttacctaaacttatgtgcttaacaggcaatgcttctcagaccacaaagcagaaagaagaagaaaagctcctgactaaatcagggctgggcttagacagagttgatctgtagaatatctttaaaggagagatgtcaactttctgcactattcccagcctctgctcctccctgtctaccctctcccctccctctctccctccacttcaccccacaatctttggtctggatttctttttattttcttttcaacttgaaagaaactggacattaggccactatgtgttgttactgccactagtgttcaagtgcctcttgttttcccagagatttcctgggtctgccagaggcccagacaggctcactcaagctctttaactgaaaagcaacaagccactccaggacaaggttcaaaatggttacaacagcctctacctgtcgccccagggagaaaggggtagtgatacaagtctcatagccagagatggttttccactccttctagatattcccaaaaagaggctgagacaggaggttattttcaattttattttggaattaaatacttttttccctttattactgttgtagtccctcacttggatatacctctgttttcacgatagaaataagggaggtctagagcttctattccttggccattgtcaacggagagctggccaagtcttcacaaacccttgcaacattgcctgaagtttatggaataagatgtattctcactcccttgatctcaagggcgtaactctggaagcacagcttgactacacgtcatttttaccaatgattttcaggtgacctgggctaagtcatttaaactgggtctttataaaagtaaaaggccaacatttaattattttgcaaagcaacctaagagctaaagatgtaatttttcttgcaattgtaaatcttttgtgtctcctgaagacttcccttaaaattagctctgagtgaaaaatcaaaagagacaaaagacatcttcgaatccatatttcaagcctggtagaattggcttttctagcagaacctttccaaaagttttatattgagattcataacaacaccaagaattgattttgtagccaacattcattcaatactgttatatcagaggagtaggagagaggaaacatttgacttatctggaaaagcaaaatgtacttaagaataagaataacatggtccattcacctttatgttatagatatgtctttgtgtaaatcatttgttttgagttttcaaagaatagcccattgttcattcttgtgctgtacaatgaccactgttattgttactttgacttttcagagcacacccttcctctggtttttgtatatttattgatggatcaataataatgaggaaagcatgatatgtatattgctgagttgaaagcacttattggaaaatattaaaaggctaacattaaaagactaaaggaaacagactcagaa

SEQ ID NO: 92 - protein, 691 aa, Homo Sapiens
MDKFWWHAAWGLCLVPLSLAQIDLNITCRFAGVFHVEKNGRYSISRTEAADLCKAFNSTLPTMAQMEKALSIGFETCRYGFIEGHVVIPRIHPNSICAANNTGVYILTSNTSQYDTYCFNASAPPEEDCTSVTDLPNAFDGPITITIVNRDGTRYVQKGEYRTNPEDIYPSNPTDDDVSSGSSSERSSTSGGYIFYTFSTVHPIPDEDSPWITDSTDRIPATTLMSTSATATETATKRQETWDWFSWLFLPSESKNHLHTTTQMAAGWEPNEENEDERDRHLSFSGSGIDDDEDFISSTISTTPRAFDHTKQNQDWTQWNPSHSNPEVLLQTTTRMTDVDRNGTTAYEGNWNPEAHPPLIHHEHHEEEETPHSTSTTASAHTSHPMQGRTTPSPEDSSWTDFFNPISHPMGRGHQAGRRMDMDSSHSITLQPTANPNTGLVEDLDRTGPLSMTTQQSNSQSFSTSHEGLEEDKDHPTTSTLTSSNRNDVTGGRRDPNHSEGSTTLLEGYTSHYPHTKESRTFIPVTSAKTGSFGVTAVTVGDSNSNVNRSLSGDQDTFHPSGGSHTTHGSESDGHSHGSQEGGANTTSGPIRTPQIPEWLIILASLLALALILAVCIAVNSRRRCGQKKKLVINSGNGAVEDRKPSGLNGEASKSQEMVHLVNKESSETPDQFMTADETRNLQNVDMKIGV

SEQ ID NO: 93 - DNA, 5053 bp, Homo Sapiens
gagaagaaagccagtgcgtctctgggcgcaggggccagtggggctcggaggcacaggcaccccgcgacactccaggttccccgacccacgtccctggcagccccgattatttacagcctcagcagagcacggggcgggggcagaggggcccgcccgggagggctgctacttcttaaaacctctgcgggctgcttagtcacagccccccttgcttgggtgtgtccttcgctcgctccctccctccgtcttaggtcactgttttcaacctcgaataaaaactgcagccaacttccgaggcagcctcattgcccagcggaccccagcctctgccaggttcggtccgccatcctcgtcccgtcctccgccggcccctgccccgcgcccagggatcctccagctcctttcgcccgcgccctccgttcgctccggacaccatggacaagttttggtggcacgcagcctggggactctgcctcgtgccgctgagcctggcgcagatcgatttgaatataacctgccgctttgcaggtgtattccacgtggagaaaaatggtcgctacagcatctctcggacggaggccgctgacctctgcaaggctttcaatagcaccttgcccacaatggcccagatggagaaagctctgagcatcggatttgagacctgcaggtatgggttcatagaagggcacgtggtgattccccggatccaccccaactccatctgtgcagcaaacaacacaggggtgtacatcctcacatccaacacctcccagtatgacacatattgcttcaatgcttcagctccacctgaagaagattgtacatcagtcacagacctgcccaatgcctttgatggaccaattaccataactattgttaaccgtgatggcacccgctatgtccagaaaggagaatacagaacgaatcctgaagacatctaccccagcaaccctactgatgatgacgtgagcagcggctcctccagtgaaaggagcagcacttcaggaggttacatcttttacaccttttctactgtacaccccatcccagacgaagacagtccctggatcaccgacagcacagacagaatccctgctaccagtacgtcttcaaataccatctcagcaggctgggagccaaatgaagaaaatgaagatgaaagagacagacacctcagtttttctggatcaggcattgatgatgatgaagattttatctccagcaccaatatggactccagtcatagtataacgcttcagcctactgcaaatccaaacacaggtttggtggaagatttggacaggacaggacctctttcaatgacaacgcagcagagtaattctcagagcttctctacatcacatgaaggcttggaagaagataaagaccatccaacaacttctactctgacatcaagcaataggaatgatgtcacaggtggaagaagagacccaaatcattctgaaggctcaactactttactggaaggttatacctctcattacccacacacgaaggaaagcaggaccttcatcccagtgacctcagctaagactgggtcctttggagttactgcagttactgttggagattccaactctaatgtcaatcgttccttatcaggagaccaagacacattccaccccagtggggggtcccataccactcatggatctgaatcagatggacactcacatgggagtcaagaaggtggagcaaacacaacctctggtcctataaggacaccccaaattccagaatggctgatcatcttggcatccctcttggccttggctttgattcttgcagtttgcattgcagtcaacagtcgaagaaggtgtgggcagaagaaaaagctagtgatcaacagtggcaatggagctgtggaggacagaaagccaagtggactcaacggagaggccagcaagtctcaggaaatggtgcatttggtgaacaaggagtcgtcagaaactccagaccagtttatgacagctgatgagacaaggaacctgcagaatgtggacatgaagattggggtgtaacacctacaccattatcttggaaagaaacaaccgttggaaacataaccattacagggagctgggacacttaacagatgcaatgtgctactgattgtttcattgcgaatcttttttagcataaaattttctactctttttgttttttgtgttttgttctttaaagtcaggtccaatttgtaaaaacagcattgctttctgaaattagggcccaattaataatcagcaagaatttgatcgttccagttcccacttggaggcctttcatccctcgggtgtgctatggatggcttctaacaaaaactacacatatgtattcctgatcgccaacctttcccccaccagctaaggacatttcccagggttaatagggcctggtccctgggaggaaatttgaatgggtccattttgcccttccatagcctaatccctgggcattgctttccactgaggttgggggttggggtgtactagttacacatcttcaacagaccccctctagaaatttttcagatgcttctgggagacacccaaagggtgaagctatttatctgtagtaaactatttatctgtgtttttgaaatattaaaccctggatcagtcctttgatcagtataattttttaaagttactttgtcagaggcacaaaagggtttaaactgattcataataaatatctgtacttcttcgatcttcaccttttgtgctgtgattcttcagtttctaaaccagcactgtctgggtccctacaatgtatcaggaagagctgagaatggtaaggagactcttctaagtcttcatctcagagaccctgagttcccactcagacccactcagccaaatctcatggaagaccaaggagggcagcactgtttttgttttttgttttttacactgtccaaaggttttccatcctgtcctggaatcagagttggaagctgaggagcttcagcctcttttatggtttaatggccacctgttctctcctgtgaaaggctttgcaaagtcacattaagtttgcatgacctgttatccctggggccctatttcatagaggctggccctattagtgatttccaaaaacaatatggaagtgccttttgatgtcttacaataagagaagaagccaatggaaatgaaagagattggcaaaggggaaggatgatgccatgtagatcctgtttgacatttttatggctgtatttgtaaacttaaacacaccagtgtctgttcttgatgcagttgctatttaggatgagttaagtgcctggggagtccctcaaaaggttaaagggattcccatcattggaatcttatcaccagataggcaagtttatgaccaaacaagagagtactggctttatcctctaacctcatattttctcccacttggcaagtcctttgtggcatttattcatcagtcagggtgtccgattggtcctagaacttccaaaggctgcttgtcatagaagccattgcatctataaagcaacggctcctgttaaatggtatctcctttctgaggctcctactaaaagtcatttgttacctaaacttatgtgcttaacaggcaatgcttctcagaccacaaagcagaaagaagaagaaaagctcctgactaaatcagggctgggcttagacagagttgatctgtagaatatctttaaaggagagatgtcaactttctgcactattcccagcctctgctcctccctgtctaccctctcccctccctctctccctccacttcaccccacaatctttggtctggatttctttttattttcttttcaacttgaaagaaactggacattaggccactatgtgttgttactgccactagtgttcaagtgcctcttgttttcccagagatttcctgggtctgccagaggcccagacaggctcactcaagctctttaactgaaaagcaacaagccactccaggacaaggttcaaaatggttacaacagcctctacctgtcgccccagggagaaaggggtagtgatacaagtctcatagccagagatggttttccactccttctagatattcccaaaaagaggctgagacaggaggttattttcaattttattttggaattaaatacttttttccctttattactgttgtagtccctcacttggatatacctctgttttcacgatagaaataagggaggtctagagcttctattccttggccattgtcaacggagagctggccaagtcttcacaaacccttgcaacattgcctgaagtttatggaataagatgtattctcactcccttgatctcaagggcgtaactctggaagcacagcttgactacacgtcatttttaccaatgattttcaggtgacctgggctaagtcatttaaactgggtctttataaaagtaaaaggccaacatttaattattttgcaaagcaacctaagagctaaagatgtaatttttcttgcaattgtaaatcttttgtgtctcctgaagacttcccttaaaattagctctgagtgaaaaatcaaaagagacaaaagacatcttcgaatccatatttcaagcctggtagaattggcttttctagcagaacctttccaaaagttttatattgagattcataacaacaccaagaattgattttgtagccaacattcattcaatactgttatatcagaggagtaggagagaggaaacatttgacttatctggaaaagcaaaatgtacttaagaataagaataacatggtccattcacctttatgttatagatatgtctttgtgtaaatcatttgttttgagttttcaaagaatagcccattgttcattcttgtgctgtacaatgaccactgttattgttactttgacttttcagagcacacccttcctctggtttttgtatatttattgatggatcaataataatgaggaaagcatgatatgtatattgctgagttgaaagcacttattggaaaatattaaaaggctaacattaaaagactaaaggaaacagactcagaa

SEQ ID NO: 94 - protein, 535 aa, Homo Sapiens
MDKFWWHAAWGLCLVPLSLAQIDLNITCRFAGVFHVEKNGRYSISRTEAADLCKAFNSTLPTMAQMEKALSIGFETCRYGFIEGHVVIPRIHPNSICAANNTGVYILTSNTSQYDTYCFNASAPPEEDCTSVTDLPNAFDGPITITIVNRDGTRYVQKGEYRTNPEDIYPSNPTDDDVSSGSSSERSSTSGGYIFYTFSTVHPIPDEDSPWITDSTDRIPATSTSSNTISAGWEPNEENEDERDRHLSFSGSGIDDDEDFISSTNMDSSHSITLQPTANPNTGLVEDLDRTGPLSMTTQQSNSQSFSTSHEGLEEDKDHPTTSTLTSSNRNDVTGGRRDPNHSEGSTTLLEGYTSHYPHTKESRTFIPVTSAKTGSFGVTAVTVGDSNSNVNRSLSGDQDTFHPSGGSHTTHGSESDGHSHGSQEGGANTTSGPIRTPQIPEWLIILASLLALALILAVCIAVNSRRRCGQKKKLVINSGNGAVEDRKPSGLNGEASKSQEMVHLVNKESSETPDQFMTADETRNLQNVDMKIGV

SEQ ID NO: 95 - DNA, 4633 bp, Homo Sapiens
gagaagaaagccagtgcgtctctgggcgcaggggccagtggggctcggaggcacaggcaccccgcgacactccaggttccccgacccacgtccctggcagccccgattatttacagcctcagcagagcacggggcgggggcagaggggcccgcccgggagggctgctacttcttaaaacctctgcgggctgcttagtcacagccccccttgcttgggtgtgtccttcgctcgctccctccctccgtcttaggtcactgttttcaacctcgaataaaaactgcagccaacttccgaggcagcctcattgcccagcggaccccagcctctgccaggttcggtccgccatcctcgtcccgtcctccgccggcccctgccccgcgcccagggatcctccagctcctttcgcccgcgccctccgttcgctccggacaccatggacaagttttggtggcacgcagcctggggactctgcctcgtgccgctgagcctggcgcagatcgatttgaatataacctgccgctttgcaggtgtattccacgtggagaaaaatggtcgctacagcatctctcggacggaggccgctgacctctgcaaggctttcaatagcaccttgcccacaatggcccagatggagaaagctctgagcatcggatttgagacctgcaggtatgggttcatagaagggcacgtggtgattccccggatccaccccaactccatctgtgcagcaaacaacacaggggtgtacatcctcacatccaacacctcccagtatgacacatattgcttcaatgcttcagctccacctgaagaagattgtacatcagtcacagacctgcccaatgcctttgatggaccaattaccataactattgttaaccgtgatggcacccgctatgtccagaaaggagaatacagaacgaatcctgaagacatctaccccagcaaccctactgatgatgacgtgagcagcggctcctccagtgaaaggagcagcacttcaggaggttacatcttttacaccttttctactgtacaccccatcccagacgaagacagtccctggatcaccgacagcacagacagaatccctgctaccaatatggactccagtcatagtataacgcttcagcctactgcaaatccaaacacaggtttggtggaagatttggacaggacaggacctctttcaatgacaacgcgagaccaagacacattccaccccagtggggggtcccataccactcatggatctgaatcagatggacactcacatgggagtcaagaaggtggagcaaacacaacctctggtcctataaggacaccccaaattccagaatggctgatcatcttggcatccctcttggccttggctttgattcttgcagtttgcattgcagtcaacagtcgaagaaggtgtgggcagaagaaaaagctagtgatcaacagtggcaatggagctgtggaggacagaaagccaagtggactcaacggagaggccagcaagtctcaggaaatggtgcatttggtgaacaaggagtcgtcagaaactccagaccagtttatgacagctgatgagacaaggaacctgcagaatgtggacatgaagattggggtgtaacacctacaccattatcttggaaagaaacaaccgttggaaacataaccattacagggagctgggacacttaacagatgcaatgtgctactgattgtttcattgcgaatcttttttagcataaaattttctactctttttgttttttgtgttttgttctttaaagtcaggtccaatttgtaaaaacagcattgctttctgaaattagggcccaattaataatcagcaagaatttgatcgttccagttcccacttggaggcctttcatccctcgggtgtgctatggatggcttctaacaaaaactacacatatgtattcctgatcgccaacctttcccccaccagctaaggacatttcccagggttaatagggcctggtccctgggaggaaatttgaatgggtccattttgcccttccatagcctaatccctgggcattgctttccactgaggttgggggttggggtgtactagttacacatcttcaacagaccccctctagaaatttttcagatgcttctgggagacacccaaagggtgaagctatttatctgtagtaaactatttatctgtgtttttgaaatattaaaccctggatcagtcctttgatcagtataattttttaaagttactttgtcagaggcacaaaagggtttaaactgattcataataaatatctgtacttcttcgatcttcaccttttgtgctgtgattcttcagtttctaaaccagcactgtctgggtccctacaatgtatcaggaagagctgagaatggtaaggagactcttctaagtcttcatctcagagaccctgagttcccactcagacccactcagccaaatctcatggaagaccaaggagggcagcactgtttttgttttttgttttttacactgtccaaaggttttccatcctgtcctggaatcagagttggaagctgaggagcttcagcctcttttatggtttaatggccacctgttctctcctgtgaaaggctttgcaaagtcacattaagtttgcatgacctgttatccctggggccctatttcatagaggctggccctattagtgatttccaaaaacaatatggaagtgccttttgatgtcttacaataagagaagaagccaatggaaatgaaagagattggcaaaggggaaggatgatgccatgtagatcctgtttgacatttttatggctgtatttgtaaacttaaacacaccagtgtctgttcttgatgcagttgctatttaggatgagttaagtgcctggggagtccctcaaaaggttaaagggattcccatcattggaatcttatcaccagataggcaagtttatgaccaaacaagagagtactggctttatcctctaacctcatattttctcccacttggcaagtcctttgtggcatttattcatcagtcagggtgtccgattggtcctagaacttccaaaggctgcttgtcatagaagccattgcatctataaagcaacggctcctgttaaatggtatctcctttctgaggctcctactaaaagtcatttgttacctaaacttatgtgcttaacaggcaatgcttctcagaccacaaagcagaaagaagaagaaaagctcctgactaaatcagggctgggcttagacagagttgatctgtagaatatctttaaaggagagatgtcaactttctgcactattcccagcctctgctcctccctgtctaccctctcccctccctctctccctccacttcaccccacaatctttggtctggatttctttttattttcttttcaacttgaaagaaactggacattaggccactatgtgttgttactgccactagtgttcaagtgcctcttgttttcccagagatttcctgggtctgccagaggcccagacaggctcactcaagctctttaactgaaaagcaacaagccactccaggacaaggttcaaaatggttacaacagcctctacctgtcgccccagggagaaaggggtagtgatacaagtctcatagccagagatggttttccactccttctagatattcccaaaaagaggctgagacaggaggttattttcaattttattttggaattaaatacttttttccctttattactgttgtagtccctcacttggatatacctctgttttcacgatagaaataagggaggtctagagcttctattccttggccattgtcaacggagagctggccaagtcttcacaaacccttgcaacattgcctgaagtttatggaataagatgtattctcactcccttgatctcaagggcgtaactctggaagcacagcttgactacacgtcatttttaccaatgattttcaggtgacctgggctaagtcatttaaactgggtctttataaaagtaaaaggccaacatttaattattttgcaaagcaacctaagagctaaagatgtaatttttcttgcaattgtaaatcttttgtgtctcctgaagacttcccttaaaattagctctgagtgaaaaatcaaaagagacaaaagacatcttcgaatccatatttcaagcctggtagaattggcttttctagcagaacctttccaaaagttttatattgagattcataacaacaccaagaattgattttgtagccaacattcattcaatactgttatatcagaggagtaggagagaggaaacatttgacttatctggaaaagcaaaatgtacttaagaataagaataacatggtccattcacctttatgttatagatatgtctttgtgtaaatcatttgttttgagttttcaaagaatagcccattgttcattcttgtgctgtacaatgaccactgttattgttactttgacttttcagagcacacccttcctctggtttttgtatatttattgatggatcaataataatgaggaaagcatgatatgtatattgctgagttgaaagcacttattggaaaatattaaaaggctaacattaaaagactaaaggaaacagactcagaa

SEQ ID NO: 96 - protein, 395 aa, Homo Sapiens
MDKFWWHAAWGLCLVPLSLAQIDLNITCRFAGVFHVEKNGRYSISRTEAADLCKAFNSTLPTMAQMEKALSIGFETCRYGFIEGHVVIPRIHPNSICAANNTGVYILTSNTSQYDTYCFNASAPPEEDCTSVTDLPNAFDGPITITIVNRDGTRYVQKGEYRTNPEDIYPSNPTDDDVSSGSSSERSSTSGGYIFYTFSTVHPIPDEDSPWITDSTDRIPATNMDSSHSITLQPTANPNTGLVEDLDRTGPLSMTTRDQDTFHPSGGSHTTHGSESDGHSHGSQEGGANTTSGPIRTPQIPEWLIILASLLALALILAVCIAVNSRRRCGQKKKLVINSGNGAVEDRKPSGLNGEASKSQEMVHLVNKESSETPDQFMTADETRNLQNVDMKIGV

SEQ ID NO: 97 - DNA, 4723 bp, Homo Sapiens
gagaagaaagccagtgcgtctctgggcgcaggggccagtggggctcggaggcacaggcaccccgcgacactccaggttccccgacccacgtccctggcagccccgattatttacagcctcagcagagcacggggcgggggcagaggggcccgcccgggagggctgctacttcttaaaacctctgcgggctgcttagtcacagccccccttgcttgggtgtgtccttcgctcgctccctccctccgtcttaggtcactgttttcaacctcgaataaaaactgcagccaacttccgaggcagcctcattgcccagcggaccccagcctctgccaggttcggtccgccatcctcgtcccgtcctccgccggcccctgccccgcgcccagggatcctccagctcctttcgcccgcgccctccgttcgctccggacaccatggacaagttttggtggcacgcagcctggggactctgcctcgtgccgctgagcctggcgcagatcgatttgaatataacctgccgctttgcaggtgtattccacgtggagaaaaatggtcgctacagcatctctcggacggaggccgctgacctctgcaaggctttcaatagcaccttgcccacaatggcccagatggagaaagctctgagcatcggatttgagacctgcaggtatgggttcatagaagggcacgtggtgattccccggatccaccccaactccatctgtgcagcaaacaacacaggggtgtacatcctcacatccaacacctcccagtatgacacatattgcttcaatgcttcagctccacctgaagaagattgtacatcagtcacagacctgcccaatgcctttgatggaccaattaccataactattgttaaccgtgatggcacccgctatgtccagaaaggagaatacagaacgaatcctgaagacatctaccccagcaaccctactgatgatgacgtgagcagcggctcctccagtgaaaggagcagcacttcaggaggttacatcttttacaccttttctactgtacaccccatcccagacgaagacagtccctggatcaccgacagcacagacagaatccctgctaccaatatggactccagtcatagtataacgcttcagcctactgcaaatccaaacacaggtttggtggaagatttggacaggacaggacctctttcaatgacaacgcagcagagtaattctcagagcttctctacatcacatgaaggcttggaagaagataaagaccatccaacaacttctactctgacatcaagcagagaccaagacacattccaccccagtggggggtcccataccactcatggatctgaatcagatggacactcacatgggagtcaagaaggtggagcaaacacaacctctggtcctataaggacaccccaaattccagaatggctgatcatcttggcatccctcttggccttggctttgattcttgcagtttgcattgcagtcaacagtcgaagaaggtgtgggcagaagaaaaagctagtgatcaacagtggcaatggagctgtggaggacagaaagccaagtggactcaacggagaggccagcaagtctcaggaaatggtgcatttggtgaacaaggagtcgtcagaaactccagaccagtttatgacagctgatgagacaaggaacctgcagaatgtggacatgaagattggggtgtaacacctacaccattatcttggaaagaaacaaccgttggaaacataaccattacagggagctgggacacttaacagatgcaatgtgctactgattgtttcattgcgaatcttttttagcataaaattttctactctttttgttttttgtgttttgttctttaaagtcaggtccaatttgtaaaaacagcattgctttctgaaattagggcccaattaataatcagcaagaatttgatcgttccagttcccacttggaggcctttcatccctcgggtgtgctatggatggcttctaacaaaaactacacatatgtattcctgatcgccaacctttcccccaccagctaaggacatttcccagggttaatagggcctggtccctgggaggaaatttgaatgggtccattttgcccttccatagcctaatccctgggcattgctttccactgaggttgggggttggggtgtactagttacacatcttcaacagaccccctctagaaatttttcagatgcttctgggagacacccaaagggtgaagctatttatctgtagtaaactatttatctgtgtttttgaaatattaaaccctggatcagtcctttgatcagtataattttttaaagttactttgtcagaggcacaaaagggtttaaactgattcataataaatatctgtacttcttcgatcttcaccttttgtgctgtgattcttcagtttctaaaccagcactgtctgggtccctacaatgtatcaggaagagctgagaatggtaaggagactcttctaagtcttcatctcagagaccctgagttcccactcagacccactcagccaaatctcatggaagaccaaggagggcagcactgtttttgttttttgttttttacactgtccaaaggttttccatcctgtcctggaatcagagttggaagctgaggagcttcagcctcttttatggtttaatggccacctgttctctcctgtgaaaggctttgcaaagtcacattaagtttgcatgacctgttatccctggggccctatttcatagaggctggccctattagtgatttccaaaaacaatatggaagtgccttttgatgtcttacaataagagaagaagccaatggaaatgaaagagattggcaaaggggaaggatgatgccatgtagatcctgtttgacatttttatggctgtatttgtaaacttaaacacaccagtgtctgttcttgatgcagttgctatttaggatgagttaagtgcctggggagtccctcaaaaggttaaagggattcccatcattggaatcttatcaccagataggcaagtttatgaccaaacaagagagtactggctttatcctctaacctcatattttctcccacttggcaagtcctttgtggcatttattcatcagtcagggtgtccgattggtcctagaacttccaaaggctgcttgtcatagaagccattgcatctataaagcaacggctcctgttaaatggtatctcctttctgaggctcctactaaaagtcatttgttacctaaacttatgtgcttaacaggcaatgcttctcagaccacaaagcagaaagaagaagaaaagctcctgactaaatcagggctgggcttagacagagttgatctgtagaatatctttaaaggagagatgtcaactttctgcactattcccagcctctgctcctccctgtctaccctctcccctccctctctccctccacttcaccccacaatctttggtctggatttctttttattttcttttcaacttgaaagaaactggacattaggccactatgtgttgttactgccactagtgttcaagtgcctcttgttttcccagagatttcctgggtctgccagaggcccagacaggctcactcaagctctttaactgaaaagcaacaagccactccaggacaaggttcaaaatggttacaacagcctctacctgtcgccccagggagaaaggggtagtgatacaagtctcatagccagagatggttttccactccttctagatattcccaaaaagaggctgagacaggaggttattttcaattttattttggaattaaatacttttttccctttattactgttgtagtccctcacttggatatacctctgttttcacgatagaaataagggaggtctagagcttctattccttggccattgtcaacggagagctggccaagtcttcacaaacccttgcaacattgcctgaagtttatggaataagatgtattctcactcccttgatctcaagggcgtaactctggaagcacagcttgactacacgtcatttttaccaatgattttcaggtgacctgggctaagtcatttaaactgggtctttataaaagtaaaaggccaacatttaattattttgcaaagcaacctaagagctaaagatgtaatttttcttgcaattgtaaatcttttgtgtctcctgaagacttcccttaaaattagctctgagtgaaaaatcaaaagagacaaaagacatcttcgaatccatatttcaagcctggtagaattggcttttctagcagaacctttccaaaagttttatattgagattcataacaacaccaagaattgattttgtagccaacattcattcaatactgttatatcagaggagtaggagagaggaaacatttgacttatctggaaaagcaaaatgtacttaagaataagaataacatggtccattcacctttatgttatagatatgtctttgtgtaaatcatttgttttgagttttcaaagaatagcccattgttcattcttgtgctgtacaatgaccactgttattgttactttgacttttcagagcacacccttcctctggtttttgtatatttattgatggatcaataataatgaggaaagcatgatatgtatattgctgagttgaaagcacttattggaaaatattaaaaggctaacattaaaagactaaaggaaacagactcagaa

SEQ ID NO: 98 - protein, 425 aa, Homo Sapiens
MDKFWWHAAWGLCLVPLSLAQIDLNITCRFAGVFHVEKNGRYSISRTEAADLCKAFNSTLPTMAQMEKALSIGFETCRYGFIEGHVVIPRIHPNSICAANNTGVYILTSNTSQYDTYCFNASAPPEEDCTSVTDLPNAFDGPITITIVNRDGTRYVQKGEYRTNPEDIYPSNPTDDDVSSGSSSERSSTSGGYIFYTFSTVHPIPDEDSPWITDSTDRIPATNMDSSHSITLQPTANPNTGLVEDLDRTGPLSMTTQQSNSQSFSTSHEGLEEDKDHPTTSTLTSSRDQDTFHPSGGSHTTHGSESDGHSHGSQEGGANTTSGPIRTPQIPEWLIILASLLALALILAVCIAVNSRRRCGQKKKLVINSGNGAVEDRKPSGLNGEASKSQEMVHLVNKESSETPDQFMTADETRNLQNVDMKIGV

SEQ ID NO: 99 - DNA, 4874 bp, Homo Sapiens
gagaagaaagccagtgcgtctctgggcgcaggggccagtggggctcggaggcacaggcaccccgcgacactccaggttccccgacccacgtccctggcagccccgattatttacagcctcagcagagcacggggcgggggcagaggggcccgcccgggagggctgctacttcttaaaacctctgcgggctgcttagtcacagccccccttgcttgggtgtgtccttcgctcgctccctccctccgtcttaggtcactgttttcaacctcgaataaaaactgcagccaacttccgaggcagcctcattgcccagcggaccccagcctctgccaggttcggtccgccatcctcgtcccgtcctccgccggcccctgccccgcgcccagggatcctccagctcctttcgcccgcgccctccgttcgctccggacaccatggacaagttttggtggcacgcagcctggggactctgcctcgtgccgctgagcctggcgcagatcgatttgaatataacctgccgctttgcaggtgtattccacgtggagaaaaatggtcgctacagcatctctcggacggaggccgctgacctctgcaaggctttcaatagcaccttgcccacaatggcccagatggagaaagctctgagcatcggatttgagacctgcaggtatgggttcatagaagggcacgtggtgattccccggatccaccccaactccatctgtgcagcaaacaacacaggggtgtacatcctcacatccaacacctcccagtatgacacatattgcttcaatgcttcagctccacctgaagaagattgtacatcagtcacagacctgcccaatgcctttgatggaccaattaccataactattgttaaccgtgatggcacccgctatgtccagaaaggagaatacagaacgaatcctgaagacatctaccccagcaaccctactgatgatgacgtgagcagcggctcctccagtgaaaggagcagcacttcaggaggttacatcttttacaccttttctactgtacaccccatcccagacgaagacagtccctggatcaccgacagcacagacagaatccctgctaccaatatggactccagtcatagtataacgcttcagcctactgcaaatccaaacacaggtttggtggaagatttggacaggacaggacctctttcaatgacaacgcagcagagtaattctcagagcttctctacatcacatgaaggcttggaagaagataaagaccatccaacaacttctactctgacatcaagcaataggaatgatgtcacaggtggaagaagagacccaaatcattctgaaggctcaactactttactggaaggttatacctctcattacccacacacgaaggaaagcaggaccttcatcccagtgacctcagctaagactgggtcctttggagttactgcagttactgttggagattccaactctaatgtcaatcgttccttatcaggagaccaagacacattccaccccagtggggggtcccataccactcatggatctgaatcagatggacactcacatgggagtcaagaaggtggagcaaacacaacctctggtcctataaggacaccccaaattccagaatggctgatcatcttggcatccctcttggccttggctttgattcttgcagtttgcattgcagtcaacagtcgaagaaggtgtgggcagaagaaaaagctagtgatcaacagtggcaatggagctgtggaggacagaaagccaagtggactcaacggagaggccagcaagtctcaggaaatggtgcatttggtgaacaaggagtcgtcagaaactccagaccagtttatgacagctgatgagacaaggaacctgcagaatgtggacatgaagattggggtgtaacacctacaccattatcttggaaagaaacaaccgttggaaacataaccattacagggagctgggacacttaacagatgcaatgtgctactgattgtttcattgcgaatcttttttagcataaaattttctactctttttgttttttgtgttttgttctttaaagtcaggtccaatttgtaaaaacagcattgctttctgaaattagggcccaattaataatcagcaagaatttgatcgttccagttcccacttggaggcctttcatccctcgggtgtgctatggatggcttctaagacatttcccagggttaatagggcctggtccctgggaggaaatttgaatgggtccattttgcccttccatagcctaatccctgggcattgctttccactgaggttgggggttggggtgtactagttacacatcttcaacagaccccctctagaaatttttcagatgcttctgggagacacccaaagggtgaagctatttatctgtagtaaactatttatctgtgtttttgaaatattaaaccctggatcagtcctttgatcagtataattttttaaagttactttgtcagaggcacaaaagggtttaaactgattcataataaatatctgtacttcttcgatcttcaccttttgtgctgtgattcttcagtttctaaaccagcactgtctgggtccctacaatgtatcaggaagagctgagaatggtaaggagactcttctaagtcttcatctcagagaccctgagttcccactcagacccactcagccaaatctcatggaagaccaaggagggcagcactgtttttgttttttgttttttacactgtccaaaggttttccatcctgtcctggaatcagagttggaagctgaggagcttcagcctcttttatggtttaatggccacctgttctctcctgtgaaaggctttgcaaagtcacattaagtttgcatgacctgttatccctggggccctatttcatagaggctggccctattagtgatttccaaaaacaatatggaagtgccttttgatgtcttacaataagagaagaagccaatggaaatgaaagagattggcaaaggggaaggatgatgccatgtagatcctgtttgacatttttatggctgtatttgtaaacttaaacacaccagtgtctgttcttgatgcagttgctatttaggatgagttaagtgcctggggagtccctcaaaaggttaaagggattcccatcattggaatcttatcaccagataggcaagtttatgaccaaacaagagagtactggctttatcctctaacctcatattttctcccacttggcaagtcctttgtggcatttattcatcagtcagggtgtccgattggtcctagaacttccaaaggctgcttgtcatagaagccattgcatctataaagcaacggctcctgttaaatggtatctcctttctgaggctcctactaaaagtcatttgttacctaaacttatgtgcttaacaggcaatgcttctcagaccacaaagcagaaagaagaagaaaagctcctgactaaatcagggctgggcttagacagagttgatctgtagaatatctttaaaggagagatgtcaactttctgcactattcccagcctctgctcctccctgtctaccctctcccctccctctctccctccacttcaccccacaatctttggtctggatttctttttattttcttttcaacttgaaagaaactggacattaggccactatgtgttgttactgccactagtgttcaagtgcctcttgttttcccagagatttcctgggtctgccagaggcccagacaggctcactcaagctctttaactgaaaagcaacaagccactccaggacaaggttcaaaatggttacaacagcctctacctgtcgccccagggagaaaggggtagtgatacaagtctcatagccagagatggttttccactccttctagatattcccaaaaagaggctgagacaggaggttattttcaattttattttggaattaaatacttttttccctttattactgttgtagtccctcacttggatatacctctgttttcacgatagaaataagggaggtctagagcttctattccttggccattgtcaacggagagctggccaagtcttcacaaacccttgcaacattgcctgaagtttatggaataagatgtattctcactcccttgatctcaagggcgtaactctggaagcacagcttgactacacgtcatttttaccaatgattttcaggtgacctgggctaagtcatttaaactgggtctttataaaagtaaaaggccaacatttaattattttgcaaagcaacctaagagctaaagatgtaatttttcttgcaattgtaaatcttttgtgtctcctgaagacttcccttaaaattagctctgagtgaaaaatcaaaagagacaaaagacatcttcgaatccatatttcaagcctggtagaattggcttttctagcagaacctttccaaaagttttatattgagattcataacaacaccaagaattgattttgtagccaacattcattcaatactgttatatcagaggagtaggagagaggaaacatttgacttatctggaaaagcaaaatgtacttaagaataagaataacatggtccattcacctttatgttatagatatgtctttgtgtaaatcatttgttttgagttttcaaagaatagcccattgttcattcttgtgctgtacaatgaccactgttattgttactttgacttttcagagcacacccttcctctggtttttgtatatttattgatggatcaataataatgaggaaagcatgatatgtatattgctgagttgaaagcacttattggaaaatattaaaaggctaacattaaaagactaaaggaaacagactcagaa

SEQ ID NO: 100 - protein, 493 aa, Homo Sapiens
MDKFWWHAAWGLCLVPLSLAQIDLNITCRFAGVFHVEKNGRYSISRTEAADLCKAFNSTLPTMAQMEKALSIGFETCRYGFIEGHVVIPRIHPNSICAANNTGVYILTSNTSQYDTYCFNASAPPEEDCTSVTDLPNAFDGPITITIVNRDGTRYVQKGEYRTNPEDIYPSNPTDDDVSSGSSSERSSTSGGYIFYTFSTVHPIPDEDSPWITDSTDRIPATNMDSSHSITLQPTANPNTGLVEDLDRTGPLSMTTQQSNSQSFSTSHEGLEEDKDHPTTSTLTSSNRNDVTGGRRDPNHSEGSTTLLEGYTSHYPHTKESRTFIPVTSAKTGSFGVTAVTVGDSNSNVNRSLSGDQDTFHPSGGSHTTHGSESDGHSHGSQEGGANTTSGPIRTPQIPEWLIILASLLALALILAVCIAVNSRRRCGQKKKLVINSGNGAVEDRKPSGLNGEASKSQEMVHLVNKESSETPDQFMTADETRNLQNVDMKIGV

SEQ ID NO: 101 - DNA, 4335 bp, Homo Sapiens
gagaagaaagccagtgcgtctctgggcgcaggggccagtggggctcggaggcacaggcaccccgcgacactccaggttccccgacccacgtccctggcagccccgattatttacagcctcagcagagcacggggcgggggcagaggggcccgcccgggagggctgctacttcttaaaacctctgcgggctgcttagtcacagccccccttgcttgggtgtgtccttcgctcgctccctccctccgtcttaggtcactgttttcaacctcgaataaaaactgcagccaacttccgaggcagcctcattgcccagcggaccccagcctctgccaggttcggtccgccatcctcgtcccgtcctccgccggcccctgccccgcgcccagggatcctccagctcctttcgcccgcgccctccgttcgctccggacaccatggacaagttttggtggcacgcagcctggggactctgcctcgtgccgctgagcctggcgcagatcgatttgaatataacctgccgctttgcaggtgtattccacgtggagaaaaatggtcgctacagcatctctcggacggaggccgctgacctctgcaaggctttcaatagcaccttgcccacaatggcccagatggagaaagctctgagcatcggatttgagacctgcaggtatgggttcatagaagggcacgtggtgattccccggatccaccccaactccatctgtgcagcaaacaacacaggggtgtacatcctcacatccaacacctcccagtatgacacatattgcttcaatgcttcagctccacctgaagaagattgtacatcagtcacagacctgcccaatgcctttgatggaccaattaccataactattgttaaccgtgatggcacccgctatgtccagaaaggagaatacagaacgaatcctgaagacatctaccccagcaaccctactgatgatgacgtgagcagcggctcctccagtgaaaggagcagcacttcaggaggttacatcttttacaccttttctactgtacaccccatcccagacgaagacagtccctggatcaccgacagcacagacagaatccctgctaccagagaccaagacacattccaccccagtggggggtcccataccactcatggatctgaatcagatggacactcacatgggagtcaagaaggtggagcaaacacaacctctggtcctataaggacaccccaaattccagaatggctgatcatcttggcatccctcttggccttggctttgattcttgcagtttgcattgcagtcaacagtcgaagaaggtgtgggcagaagaaaaagctagtgatcaacagtggcaatggagctgtggaggacagaaagccaagtggactcaacggagaggccagcaagtctcaggaaatggtgcatttggtgaacaaggagtcgtcagaaactccagaccagtttatgacagctgatgagacaaggaacctgcagaatgtggacatgaagattggggtgtaacacctacaccattatcttggaaagaaacaaccgttggaaacataaccattacagggagctgggacacttaacagatgcaatgtgctactgattgtttcattgcgaatcttttttagcataaaattttctactctttcccccaccagctaaggacatttcccagggttaatagggcctggtccctgggaggaaatttgaatgggtccattttgcccttccatagcctaatccctgggcattgctttccactgaggttgggggttggggtgtactagttacacatcttcaacagaccccctctagaaatttttcagatgcttctgggagacacccaaagggtgaagctatttatctgtagtaaactatttatctgtgtttttgaaatattaaaccctggatcagtcctttgatcagtataattttttaaagttactttgtcagaggcacaaaagggtttaaactgattcataataaatatctgtacttcttcgatcttcaccttttgtgctgtgattcttcagtttctaaaccagcactgtctgggtccctacaatgtatcaggaagagctgagaatggtaaggagactcttctaagtcttcatctcagagaccctgagttcccactcagacccactcagccaaatctcatggaagaccaaggagggcagcactgtttttgttttttgttttttacactgtccaaaggttttccatcctgtcctggaatcagagttggaagctgaggagcttcagcctcttttatggtttaatggccacctgttctctcctgtgaaaggctttgcaaagtcacattaagtttgcatgacctgttatccctggggccctatttcatagaggctggccctattagtgatttccaaaaacaatatggaagtgccttttgatgtcttacaataagagaagaagccaatggaaatgaaagagattggcaaaggggaaggatgatgccatgtagatcctgtttgacatttttatggctgtatttgtaaacttaaacacaccagtgtctgttcttgatgcagttgctatttaggatgagttaagtgcctggggagtccctcaaaaggttaaagggattcccatcattggaatcttatcaccagataggcaagtttatgaccaaacaagagagtactggctttatcctctaacctcatattttctcccacttggcaagtcctttgtggcatttattcatcagtcagggtgtccgattggtcctagaacttccaaaggctgcttgtcatagaagccattgcatctataaagcaacggctcctgttaaatggtatctcctttctgaggctcctactaaaagtcatttgttacctaaacttatgtgcttaacaggcaatgcttctcagaccacaaagcagaaagaagaagaaaagctcctgactaaatcagggctgggcttagacagagttgatctgtagaatatctttaaaggagagatgtcaactttctgcactattcccagcctctgctcctccctgtctaccctctcccctccctctctccctccacttcaccccacaatctttggtctggatttctttttattttcttttcaacttgaaagaaactggacattaggccactatgtgttgttactgccactagtgttcaagtgcctcttgttttcccagagatttcctgggtctgccagaggcccagacaggctcactcaagctctttaactgaaaagcaacaagccactccaggacaaggttcaaaatggttacaacagcctctacctgtcgccccagggagaaaggggtagtgatacaagtctcatagccagagatggttttccactccttctagatattcccaaaaagaggctgagacaggaggttattttcaattttattttggaattaaatacttttttccctttattactgttgtagtccctcacttggatatacctctgttttcacgatagaaataagggaggtctagagcttctattccttggccattgtcaacggagagctggccaagtcttcacaaacccttgcaacattgcctgaagtttatggaataagatgtattctcactcccttgatctcaagggcgtaactctggaagcacagcttgactacacgtcatttttaccaatgattttcaggtgacctgggctaagtcatttaaactgggtctttataaaagtaaaaggccaacatttaattattttgcaaagcaacctaagagctaaagatgtaatttttcttgcaattgtaaatcttttgtgtctcctgaagacttcccttaaaattagctctgagtgaaaaatcaaaagagacaaaagacatcttcgaatccatatttcaagcctggtagaattggcttttctagcagaacctttccaaaagttttatattgagattcataacaacaccaagaattgattttgtagccaacattcattcaatactgttatatcagaggagtaggagagaggaaacatttgacttatctggaaaagcaaaatgtacttaagaataagaataacatggtccattcacctttatgttatagatatgtctttgtgtaaatcatttgttttgagttttcaaagaatagcccattgttcattcttgtgctgtacaatgaccactgttattgttactttgacttttcagagcacacccttcctctggtttttgtatatttattgatggatcaataataatgaggaaagcatgatatgtatattgctgagttgaaagcacttattggaaaatattaaaaggctaacattaaaagactaaaggaaacagactcagaa

SEQ ID NO: 102 - protein, 361 aa, Homo Sapiens
MDKFWWHAAWGLCLVPLSLAQIDLNITCRFAGVFHVEKNGRYSISRTEAADLCKAFNSTLPTMAQMEKALSIGFETCRYGFIEGHVVIPRIHPNSICAANNTGVYILTSNTSQYDTYCFNASAPPEEDCTSVTDLPNAFDGPITITIVNRDGTRYVQKGEYRTNPEDIYPSNPTDDDVSSGSSSERSSTSGGYIFYTFSTVHPIPDEDSPWITDSTDRIPATRDQDTFHPSGGSHTTHGSESDGHSHGSQEGGANTTSGPIRTPQIPEWLIILASLLALALILAVCIAVNSRRRCGQKKKLVINSGNGAVEDRKPSGLNGEASKSQEMVHLVNKESSETPDQFMTADETRNLQNVDMKIGV

SEQ ID NO: 103 - DNA, 5674 bp, Homo Sapiens
gagaagaaagccagtgcgtctctgggcgcaggggccagtggggctcggaggcacaggcaccccgcgacactccaggttccccgacccacgtccctggcagccccgattatttacagcctcagcagagcacggggcgggggcagaggggcccgcccgggagggctgctacttcttaaaacctctgcgggctgcttagtcacagccccccttgcttgggtgtgtccttcgctcgctccctccctccgtcttaggtcactgttttcaacctcgaataaaaactgcagccaacttccgaggcagcctcattgcccagcggaccccagcctctgccaggttcggtccgccatcctcgtcccgtcctccgccggcccctgccccgcgcccagggatcctccagctcctttcgcccgcgccctccgttcgctccggacaccatggacaagttttggtggcacgcagcctggggactctgcctcgtgccgctgagcctggcgcagatcgatttgaatataacctgccgctttgcaggtgtattccacgtggagaaaaatggtcgctacagcatctctcggacggaggccgctgacctctgcaaggctttcaatagcaccttgcccacaatggcccagatggagaaagctctgagcatcggatttgagacctgcaggtatgggttcatagaagggcacgtggtgattccccggatccaccccaactccatctgtgcagcaaacaacacaggggtgtacatcctcacatccaacacctcccagtatgacacatattgcttcaatgcttcagctccacctgaagaagattgtacatcagtcacagacctgcccaatgcctttgatggaccaattaccataactattgttaaccgtgatggcacccgctatgtccagaaaggagaatacagaacgaatcctgaagacatctaccccagcaaccctactgatgatgacgtgagcagcggctcctccagtgaaaggagcagcacttcaggaggttacatcttttacaccttttctactgtacaccccatcccagacgaagacagtccctggatcaccgacagcacagacagaatccctgctaccactttgatgagcactagtgctacagcaactgagacagcaaccaagaggcaagaaacctgggattggttttcatggttgtttctaccatcagagtcaaagaatcatcttcacacaacaacacaaatggctggtacgtcttcaaataccatctcagcaggctgggagccaaatgaagaaaatgaagatgaaagagacagacacctcagtttttctggatcaggcattgatgatgatgaagattttatctccagcaccatttcaaccacaccacgggcttttgaccacacaaaacagaaccaggactggacccagtggaacccaagccattcaaatccggaagtgctacttcagacaaccacaaggatgactgatgtagacagaaatggcaccactgcttatgaaggaaactggaacccagaagcacaccctcccctcattcaccatgagcatcatgaggaagaagagaccccacattctacaagcacaatccaggcaactcctagtagtacaacggaagaaacagctacccagaaggaacagtggtttggcaacagatggcatgagggatatcgccaaacacccagagaagactcccattcgacaacagggacagctgcagcctcagctcataccagccatccaatgcaaggaaggacaacaccaagcccagaggacagttcctggactgatttcttcaacccaatctcacaccccatgggacgaggtcatcaagcaggaagaaggatggatatggactccagtcatagtataacgcttcagcctactgcaaatccaaacacaggtttggtggaagatttggacaggacaggacctctttcaatgacaacgcagcagagtaattctcagagcttctctacatcacatgaaggcttggaagaagataaagaccatccaacaacttctactctgacatcaagcaataggaatgatgtcacaggtggaagaagagacccaaatcattctgaaggctcaactactttactggaaggttatacctctcattacccacacacgaaggaaagcaggaccttcatcccagtgacctcagctaagactgggtcctttggagttactgcagttactgttggagattccaactctaatgtcaatcgttccttatcaggagaccaagacacattccaccccagtggggggtcccataccactcatggatctgaatcagatggacactcacatgggagtcaagaaggtggagcaaacacaacctctggtcctataaggacaccccaaattccagaatggctgatcatcttggcatccctcttggccttggctttgattcttgcagtttgcattgcagtcaacagtcgaagaaggtgtgggcagaagaaaaagctagtgatcaacagtggcaatggagctgtggaggacagaaagccaagtggactcaacggagaggccagcaagtctcaggaaatggtgcatttggtgaacaaggagtcgtcagaaactccagaccagtttatgacagctgatgagacaaggaacctgcagaatgtggacatgaagattggggtgtaacacctacaccattatcttggaaagaaacaaccgttggaaacataaccattacagggagctgggacacttaacagatgcaatgtgctactgattgtttcattgcgaatcttttttagcataaaattttctactctttttgttttttgtgttttgttctttaaagtcaggtccaatttgtaaaaacagcattgctttctgaaattagggcccaattaataatcagcaagaatttgatcgttccagttcccacttggaggcctttcatccctcgggtgtgctatggatggcttctaacaaaaactacacatatgtattcctgatcgccaacctttcccccaccagctaaggacatttcccagggttaatagggcctggtccctgggaggaaatttgaatgggtccattttgcccttccatagcctaatccctgggcattgctttccactgaggttgggggttggggtgtactagttacacatcttcaacagaccccctctagaaatttttcagatgcttctgggagacacccaaagggtgaagctatttatctgtagtaaactatttatctgtgtttttgaaatattaaaccctggatcagtcctttgatcagtataattttttaaagttactttgtcagaggcacaaaagggtttaaactgattcataataaatatctgtacttcttcgatcttcaccttttgtgctgtgattcttcagtttctaaaccagcactgtctgggtccctacaatgtatcaggaagagctgagaatggtaaggagactcttctaagtcttcatctcagagaccctgagttcccactcagacccactcagccaaatctcatggaagaccaaggagggcagcactgtttttgttttttgttttttacactgtccaaaggttttccatcctgtcctggaatcagagttggaagctgaggagcttcagcctcttttatggtttaatggccacctgttctctcctgtgaaaggctttgcaaagtcacattaagtttgcatgacctgttatccctggggccctatttcatagaggctggccctattagtgatttccaaaaacaatatggaagtgccttttgatgtcttacaataagagaagaagccaatggaaatgaaagagattggcaaaggggaaggatgatgccatgtagatcctgtttgacatttttatggctgtatttgtaaacttaaacacaccagtgtctgttcttgatgcagttgctatttaggatgagttaagtgcctggggagtccctcaaaaggttaaagggattcccatcattggaatcttatcaccagataggcaagtttatgaccaaacaagagagtactggctttatcctctaacctcatattttctcccacttggcaagtcctttgtggcatttattcatcagtcagggtgtccgattggtcctagaacttccaaaggctgcttgtcatagaagccattgcatctataaagcaacggctcctgttaaatggtatctcctttctgaggctcctactaaaagtcatttgttacctaaacttatgtgcttaacaggcaatgcttctcagaccacaaagcagaaagaagaagaaaagctcctgactaaatcagggctgggcttagacagagttgatctgtagaatatctttaaaggagagatgtcaactttctgcactattcccagcctctgctcctccctgtctaccctctcccctccctctctccctccacttcaccccacaatctttggtctggatttctttttattttcttttcaacttgaaagaaactggacattaggccactatgtgttgttactgccactagtgttcaagtgcctcttgttttcccagagatttcctgggtctgccagaggcccagacaggctcactcaagctctttaactgaaaagcaacaagccactccaggacaaggttcaaaatggttacaacagcctctacctgtcgccccagggagaaaggggtagtgatacaagtctcatagccagagatggttttccactccttctagatattcccaaaaagaggctgagacaggaggttattttcaattttattttggaattaaatacttttttccctttattactgttgtagtccctcacttggatatacctctgttttcacgatagaaataagggaggtctagagcttctattccttggccattgtcaacggagagctggccaagtcttcacaaacccttgcaacattgcctgaagtttatggaataagatgtattctcactcccttgatctcaagggcgtaactctggaagcacagcttgactacacgtcatttttaccaatgattttcaggtgacctgggctaagtcatttaaactgggtctttataaaagtaaaaggccaacatttaattattttgcaaagcaacctaagagctaaagatgtaatttttcttgcaattgtaaatcttttgtgtctcctgaagacttcccttaaaattagctctgagtgaaaaatcaaaagagacaaaagacatcttcgaatccatatttcaagcctggtagaattggcttttctagcagaacctttccaaaagttttatattgagattcataacaacaccaagaattgattttgtagccaacattcattcaatactgttatatcagaggagtaggagagaggaaacatttgacttatctggaaaagcaaaatgtacttaagaataagaataacatggtccattcacctttatgttatagatatgtctttgtgtaaatcatttgttttgagttttcaaagaatagcccattgttcattcttgtgctgtacaatgaccactgttattgttactttgacttttcagagcacacccttcctctggtttttgtatatttattgatggatcaataataatgaggaaagcatgatatgtatattgctgagttgaaagcacttattggaaaatattaaaaggctaacattaaaagactaaaggaaacagactcagaa

SEQ ID NO: 104 - protein, 742 aa, Homo Sapiens [sequence omitted]

SEQ ID NO: 105 - DNA, 3858 bp, Homo Sapiens
gagaagaaagccagtgcgtctctgggcgcaggggccagtggggctcggaggcacaggcaccccgcgacactccaggttccccgacccacgtccctggcagccccgattatttacagcctcagcagagcacggggcgggggcagaggggcccgcccgggagggctgctacttcttaaaacctctgcgggctgcttagtcacagccccccttgcttgggtgtgtccttcgctcgctccctccctccgtcttaggtcactgttttcaacctcgaataaaaactgcagccaacttccgaggcagcctcattgcccagcggaccccagcctctgccaggttcggtccgccatcctcgtcccgtcctccgccggcccctgccccgcgcccagggatcctccagctcctttcgcccgcgccctccgttcgctccggacaccatggacaagttttggtggcacgcagcctggggactctgcctcgtgccgctgagcctggcgcagatcgatttgaatataacctgccgctttgcaggtgtattccacgtggagaaaaatggtcgctacagcatctctcggacggaggccgctgacctctgcaaggctttcaatagcaccttgcccacaatggcccagatggagaaagctctgagcatcggatttgagacctgcagtttgcattgcagtcaacagtcgaagaaggtgtgggcagaagaaaaagctagtgatcaacagtggcaatggagctgtggaggacagaaagccaagtggactcaacggagaggccagcaagtctcaggaaatggtgcatttggtgaacaaggagtcgtcagaaactccagaccagtttatgacagctgatgagacaaggaacctgcagaatgtggacatgaagattggggtgtaacacctacaccattatcttggaaagaaacaaccgttggaaacataaccattacagggagctgggacacttaacagatgcaatgtgctactgattgtttcattgcgaatcttttttagcataaaattttctactctttttgttttttgtgttttgttctttaaagtcaggtccaatttgtaaaaacagcattgctttctgaaattagggcccaattaataatcagcaagaatttgatcgttccagttcccacttggaggcctttcatccctcgggtgtgctatggatggcttctaagacatttcccagggttaatagggcctggtccctgggaggaaatttgaatgggtccattttgcccttccatagcctaatccctgggcattgctttccactgaggttgggggttggggtgtactagttacacatcttcaacagaccccctctagaaatttttcagatgcttctgggagacacccaaagggtgaagctatttatctgtagtaaactatttatctgtgtttttgaaatattaaaccctggatcagtcctttgatcagtataattttttaaagttactttgtcagaggcacaaaagggtttaaactgattcataataaatatctgtacttcttcgatcttcaccttttgtgctgtgattcttcagtttctaaaccagcactgtctgggtccctacaatgtatcaggaagagctgagaatggtaaggagactcttctaagtcttcatctcagagaccctgagttcccactcagacccactcagccaaatctcatggaagaccaaggagggcagcactgtttttgttttttgttttttacactgtccaaaggttttccatcctgtcctggaatcagagttggaagctgaggagcttcagcctcttttatggtttaatggccacctgttctctcctgtgaaaggctttgcaaagtcacattaagtttgcatgacctgttatccctggggccctatttcatagaggctggccctattagtgatttccaaaaacaatatggaagtgccttttgatgtcttacaataagagaagaagccaatggaaatgaaagagattggcaaaggggaaggatgatgccatgtagatcctgtttgacatttttatggctgtatttgtaaacttaaacacaccagtgtctgttcttgatgcagttgctatttaggatgagttaagtgcctggggagtccctcaaaaggttaaagggattcccatcattggaatcttatcaccagataggcaagtttatgaccaaacaagagagtactggctttatcctctaacctcatattttctcccacttggcaagtcctttgtggcatttattcatcagtcagggtgtccgattggtcctagaacttccaaaggctgcttgtcatagaagccattgcatctataaagcaacggctcctgttaaatggtatctcctttctgaggctcctactaaaagtcatttgttacctaaacttatgtgcttaacaggcaatgcttctcagaccacaaagcagaaagaagaagaaaagctcctgactaaatcagggctgggcttagacagagttgatctgtagaatatctttaaaggagagatgtcaactttctgcactattcccagcctctgctcctccctgtctaccctctcccctccctctctccctccacttcaccccacaatctttggtctggatttctttttattttcttttcaacttgaaagaaactggacattaggccactatgtgttgttactgccactagtgttcaagtgcctcttgttttcccagagatttcctgggtctgccagaggcccagacaggctcactcaagctctttaactgaaaagcaacaagccactccaggacaaggttcaaaatggttacaacagcctctacctgtcgccccagggagaaaggggtagtgatacaagtctcatagccagagatggttttccactccttctagatattcccaaaaagaggctgagacaggaggttattttcaattttattttggaattaaatacttttttccctttattactgttgtagtccctcacttggatatacctctgttttcacgatagaaataagggaggtctagagcttctattccttggccattgtcaacggagagctggccaagtcttcacaaacccttgcaacattgcctgaagtttatggaataagatgtattctcactcccttgatctcaagggcgtaactctggaagcacagcttgactacacgtcatttttaccaatgattttcaggtgacctgggctaagtcatttaaactgggtctttataaaagtaaaaggccaacatttaattattttgcaaagcaacctaagagctaaagatgtaatttttcttgcaattgtaaatcttttgtgtctcctgaagacttcccttaaaattagctctgagtgaaaaatcaaaagagacaaaagacatcttcgaatccatatttcaagcctggtagaattggcttttctagcagaacctttccaaaagttttatattgagattcataacaacaccaagaattgattttgtagccaacattcattcaatactgttatatcagaggagtaggagagaggaaacatttgacttatctggaaaagcaaaatgtacttaagaataagaataacatggtccattcacctttatgttatagatatgtctttgtgtaaatcatttgttttgagttttcaaagaatagcccattgttcattcttgtgctgtacaatgaccactgttattgttactttgacttttcagagcacacccttcctctggtttttgtatatttattgatggatcaataataatgaggaaagcatgatatgtatattgctgagttgaaagcacttattggaaaatattaaaaggctaacattaaaagactaaaggaaacagactcagaa

SEQ ID NO: 106 - protein, 139 aa, Homo Sapiens
MDKFWWHAAWGLCLVPLSLAQIDLNITCRFAGVFHVEKNGRYSISRTEAADLCKAFNSTLPTMAQMEKALSIGFETCSLHCSQQSKKVWAEEKASDQQWQWSCGGQKAKWTQRRGQQVSGNGAFGEQGVVRNSRPVYDS

SEQ ID NO: 107 - DNA, 5739 bp, Homo Sapiens
gagaagaaagccagtgcgtctctgggcgcaggggccagtggggctcggaggcacaggcaccccgcgacactccaggttccccgacccacgtccctggcagccccgattatttacagcctcagcagagcacggggcgggggcagaggggcccgcccgggagggctgctacttcttaaaacctctgcgggctgcttagtcacagccccccttgcttgggtgtgtccttcgctcgctccctccctccgtcttaggtcactgttttcaacctcgaataaaaactgcagccaacttccgaggcagcctcattgcccagcggaccccagcctctgccaggttcggtccgccatcctcgtcccgtcctccgccggcccctgccccgcgcccagggatcctccagctcctttcgcccgcgccctccgttcgctccggacaccatggacaagttttggtggcacgcagcctggggactctgcctcgtgccgctgagcctggcgcagatcgatttgaatataacctgccgctttgcaggtgtattccacgtggagaaaaatggtcgctacagcatctctcggacggaggccgctgacctctgcaaggctttcaatagcaccttgcccacaatggcccagatggagaaagctctgagcatcggatttgagacctgcaggtatgggttcatagaagggcacgtggtgattccccggatccaccccaactccatctgtgcagcaaacaacacaggggtgtacatcctcacatccaacacctcccagtatgacacatattgcttcaatgcttcagctccacctgaagaagattgtacatcagtcacagacctgcccaatgcctttgatggaccaattaccataactattgttaaccgtgatggcacccgctatgtccagaaaggagaatacagaacgaatcctgaagacatctaccccagcaaccctactgatgatgacgtgagcagcggctcctccagtgaaaggagcagcacttcaggaggttacatcttttacaccttttctactgtacaccccatcccagacgaagacagtccctggatcaccgacagcacagacagaatccctgctaccactttgatgagcactagtgctacagcaactgagacagcaaccaagaggcaagaaacctgggattggttttcatggttgtttctaccatcagagtcaaagaatcatcttcacacaacaacacaaatggctggtacgtcttcaaataccatctcagcaggctgggagccaaatgaagaaaatgaagatgaaagagacagacacctcagtttttctggatcaggcattgatgatgatgaagattttatctccagcaccatttcaaccacaccacgggcttttgaccacacaaaacagaaccaggactggacccagtggaacccaagccattcaaatccggaagtgctacttcagacaaccacaaggatgactgatgtagacagaaatggcaccactgcttatgaaggaaactggaacccagaagcacaccctcccctcattcaccatgagcatcatgaggaagaagagaccccacattctacaagcacaatccaggcaactcctagtagtacaacggaagaaacagctacccagaaggaacagtggtttggcaacagatggcatgagggatatcgccaaacacccagagaagactcccattcgacaacagggacagctgcagcctcagctcataccagccatccaatgcaaggaaggacaacaccaagcccagaggacagttcctggactgatttcttcaacccaatctcacaccccatgggacgaggtcatcaagcaggaagaaggatggatatggactccagtcatagtataacgcttcagcctactgcaaatccaaacacaggtttggtggaagatttggacaggacaggacctctttcaatgacaacgcagcagagtaattctcagagcttctctacatcacatgaaggcttggaagaagataaagaccatccaacaacttctactctgacatcaagcaataggaatgatgtcacaggtggaagaagagacccaaatcattctgaaggctcaactactttactggaaggttatacctctcattacccacacacgaaggaaagcaggaccttcatcccagtgacctcagctaagactgggtcctttggagttactgcagttactgttggagattccaactctaatgtcaatcgttccttatcaggagaccaagacacattccaccccagtggggggtcccataccactcatggatctgaatcagatggacactcacatgggagtcaagaaggtggagcaaacacaacctctggtcctataaggacaccccaaattccagaatggctgatcatcttggcatccctcttggccttggctttgattcttgcagtttgcattgcagtcaacagtcgaagaaggtgtgggcagaagaaaaagctagtgatcaacagtggcaatggagctgtggaggacagaaagccaagtggactcaacggagaggccagcaagtctcaggaaatggtgcatttggtgaacaaggagtcgtcagaaactccagaccagtttatgacagctgatgagacaaggaacctgcagaatgtggacatgaagattggggtgtaacacctacaccattatcttggaaagaaacaaccgttggaaacataaccattacagggagctgggacacttaacagatgcaatgtgctactgattgtttcattgcgaatcttttttagcataaaattttctactctttttgttttttgtgttttgttctttaaagtcaggtccaatttgtaaaaacagcattgctttctgaaattagggcccaattaataatcagcaagaatttgatcgttccagttcccacttggaggcctttcatccctcgggtgtgctatggatggcttctaacaaaaactacacatatgtattcctgatcgccaacctttcccccaccagctaaggacatttcccagggttaatagggcctggtccctgggaggaaatttgaatgggtccattttgcccttccatagcctaatccctgggcattgctttccactgaggttgggggttggggtgtactagttacacatcttcaacagaccccctctagaaatttttcagatgcttctgggagacacccaaagggtgaagctatttatctgtagtaaactatttatctgtgtttttgaaatattaaaccctggatcagtcctttgatcagtataattttttaaagttactttgtcagaggcacaaaagggtttaaactgattcataataaatatctgtacttcttcgatcttcaccttttgtgctgtgattcttcagtttctaaaccagcactgtctgggtccctacaatgtatcaggaagagctgagaatggtaaggagactcttctaagtcttcatctcagagaccctgagttcccactcagacccactcagccaaatctcatggaagaccaaggagggcagcactgtttttgttttttgttttttgttttttttttttgacactgtccaaaggttttccatcctgtcctggaatcagagttggaagctgaggagcttcagcctcttttatggtttaatggccacctgttctctcctgtgaaaggctttgcaaagtcacattaagtttgcatgacctgttatccctggggccctatttcatagaggctggccctattagtgatttccaaaaacaatatggaagtgccttttgatgtcttacaataagagaagaagccaatggaaatgaaagagattggcaaaggggaaggatgatgccatgtagatcctgtttgacatttttatggctgtatttgtaaacttaaacacaccagtgtctgttcttgatgcagttgctatttaggatgagttaagtgcctggggagtccctcaaaaggttaaagggattcccatcattggaatcttatcaccagataggcaagtttatgaccaaacaagagagtactggctttatcctctaacctcatattttctcccacttggcaagtcctttgtggcatttattcatcagtcagggtgtccgattggtcctagaacttccaaaggctgcttgtcatagaagccattgcatctataaagcaacggctcctgttaaatggtatctcctttctgaggctcctactaaaagtcatttgttacctaaacttatgtgcttaacaggcaatgcttctcagaccacaaagcagaaagaagaagaaaagctcctgactaaatcagggctgggcttagacagagttgatctgtagaatatctttaaaggagagatgtcaactttctgcactattcccagcctctgctcctccctgtctaccctctcccctccctctctccctccacttcaccccacaatcttgaaaaacttcctttctcttctgtgaacatcattggccagatccattttcagtggtctggatttctttttattttcttttcaacttgaaagaaactggacattaggccactatgtgttgttactgccactagtgttcaagtgcctcttgttttcccagagatttcctgggtctgccagaggcccagacaggctcactcaagctctttaactgaaaagcaacaagccactccaggacaaggttcaaaatggttacaacagcctctacctgtcgccccagggagaaaggggtagtgatacaagtctcatagccagagatggttttccactccttctagatattcccaaaaagaggctgagacaggaggttattttcaattttattttggaattaaatacttttttccctttattactgttgtagtccctcacttggatatacctctgttttcacgatagaaataagggaggtctagagcttctattccttggccattgtcaacggagagctggccaagtcttcacaaacccttgcaacattgcctgaagtttatggaataagatgtattctcactcccttgatctcaagggcgtaactctggaagcacagcttgactacacgtcatttttaccaatgattttcaggtgacctgggctaagtcatttaaactgggtctttataaaagtaaaaggccaacatttaattattttgcaaagcaacctaagagctaaagatgtaatttttcttgcaattgtaaatcttttgtgtctcctgaagacttcccttaaaattagctctgagtgaaaaatcaaaagagacaaaagacatcttcgaatccatatttcaagcctggtagaattggcttttctagcagaacctttccaaaagttttatattgagattcataacaacaccaagaattgattttgtagccaacattcattcaatactgttatatcagaggagtaggagagaggaaacatttgacttatctggaaaagcaaaatgtacttaagaataagaataacatggtccattcacctttatgttatagatatgtctttgtgtaaatcatttgttttgagttttcaaagaatagcccattgttcattcttgtgctgtacaatgaccactgttattgttactttgacttttcagagcacacccttcctctggtttttgtatatttattgatggatcaataataatgaggaaagcatgatatgtatattgctgagttgaaagcacttattggaaaatattaaaaggctaacattaaaagactaaaggaaacagactcagaa

SEQ ID NO: 108 - protein, 742 aa, Homo Sapiens [sequence omitted]

SEQ ID NO: 109 - DNA, 12718 bp, Mus Musculus
  misc_feature (478)..(497): n is a, c, g, or t
tatatgatggccgccggcgcgcgttgcgtgttttcacctctcgcctgctgaggcgcccgcggctgcttcacgagtgggtagagagtccctccgtgctgtgcccggtgttgccgtcctgggttgtgcgaccgtggctcgagcctgcctcagtctcgttcttctggtctctctgttcggccctcagtttcctttggtgagtggcggcgcggcaccggtggtgcaaaggtcctttcttctctggagtgggctcgggtgtggggagctggctggcgggggtgggatgcaggctgcaggaccccgctacgctgctgtcctcctcccgcctccccacgcacgccgcgcccttccgcgggccttttcggcggtcctcggcaggcgcgcgcgggaatggtcttttttccgatcatccacggagggcgcgcgcgggcaagcggccggagactgaacagaactcgtggggcggggcggggcgggacgnnnnnnnnnnnnnnnnnnnnccaggctgccctcttcccagagatgcgccgctattgttattttcttccacttcgtccccccaggatgaacttgcgtcctttctctaatccgccatggaattctgctccgtgcttttagccctccagagccaaagaaaccccagacaacagacgcccagacgcagcagcgtatagcagtaactccccagctcggtttccgtgccgtagtttacagtatttaattttatataatatatactatttattatagcattttgatacctcattccgtttacacatctcaaaagccgcttagtaattctcttattatttaaagaaccactacattagagaatggaatctactgtggcaacgattactagtaccctagctgctgttactgcttccgctccaccgaagtatgacaatctatggatgctcatcctgggcttcatcattgcatttgtcttggcattctccgtgggagccaatgatgtagcaaattcgttcggtacagctgtaggctcaggtgtagtgaccctgaagcaagcctgcatcttagctagcatcttcgaaactgtgggctccgccttgctgggggccaaagtgagcgaaaccatccggaacggcttgatagatgtggagctgtacaacgaaactcaagatctgctcatggctggctccgtcagtgctatgtttggtaagttgtagttataccttatgttcgctccagtcttgaaccttctctccgtgaggacgcactgcttatgtaacagttttgccatctacctgacaaaatctgattaattctgtttcaggttctgctgtgtggcagctcgtggcttcgtttttgaagcttccgatttctgggacccattgtattgtcggtgcaaccattggtttctcccttgtggcaaatgggcagaagggtgtcaagtggtctgaactgataaaaattggtatgttgaattttaaatggttttattttcgttgtgtgctgctgtgtgtcgtggagtgggagtgaagtggaggggcaagttgaagagtatcagaaatggagcacctaccatttcggggtcttgttaacaaaaacgtactttccagacctgacacttcattttgtattctattccagtgatgtcgtggttcgtctctccgctgctttctggtattatgtctggaattttattcttccttgttcgtgcgttcatcctccgtaaggtaacctttctacttgcgacctttcatgagtcacattcagtcttgttcaaactcactggtattctctcagatgtgactggtatgtaagtatgtggctttggaaagctaaaaagttctttgttctgtatacctcctgtatgttgtggagttctgtgaaagaagcaagtttttaatgccccagagggcattcaggaaggaaaaacttgagtagttctatggtctgccaagaaataaagagactgggagtgaaaactaagaacattgtttaaggtggctctgtctgtctaggtcactacattcaggacaagtggaattgtaaccttttagttcaacaggtcacagaatcctttttaaattcctctcccatgttgattgtcaagtacatagaagtttctagaggaggctttctacttgtagggactccactttctcagtaagaagagtagggatgagttgttggggggggggttgttttgttttctttttgctttaaaaaaacaggaagccattgagtttcctgactacttgaaaaccccttttgagagacttagtgccaatttcttttatcatggagactgagcctggctccacaaaaaaaaaaagtagacaacaagggattttgttgactctgggctgaattacagtaagaataaatgaatttttctcaggagacagagttgtcctattttctagggtgagtggctcttaacagtcctttgttaagctcttttaaaattcccctaaacagcagaaatctgagtgaggggagataggtaccttatcttaatggaaggtgtgtgtttagactccctgcttcttgatctagttctcggagtctctggggaatgacttctctcaatagaagtccttccctgactccttcctgatcctatacttaccattaggtgtctggcagaatgtgtttcacgtgtggagcattataaatatctctagcttggcacagtgtgactgagtaaatagttcattgatgtgcaacctctagatatggtattctttcatctagcaagcaggtatgctatgagttcccctgaccctccccccccccttatctgtagcatagggtaatctgattctccaggattcaggaatcatagtttttagtgttgctgttagagctgtgcatctcttgacataccagaaaaccagaataactaataggatgctatttggtttcatggtttttaaaggtttattctgacccctttgattattgggaaatcgatcattctgattctggagagcctctgcaaactgtttagtggtcattcctgcaagggggaacagagatgcaaaggggggttctcagtgcccagaacctctgattgacatatgccaagtatctttactctcactgtgttattggaatatcaagttgtgtatgtttaataattattctgtacagtctcaagtagcccaggctggccttgaacttctgatcctcctgcattcacatcccaagttcttgaattactgatgtgtgctcccactcccagcttaaagagtatgggtgggacaggcatggtcaagagtcatggatgatatttaatacagtgctgacttggaggctcttcccctctgtctctcacttgctcactaatccctcagtaacagatgagggatcctttcctgtctccatgtaactgagtgagaggttcacatcctttctaactaaagctttaacttctttgtctcattccttcctatattgagcccagaatagttcctgcaagtctgttgacttgacagaaagacctagtgcatatttggttttcatctttatcactatatataaaagataaagagtttacatgatgagaaaagcatttaataaaatccctagcctagctatgaagacctgggaggaggctggaagggagagacctttcctattttaccattttccttgactcttacgaagttatgatgtggtttgttttggttttaaaccactaagtctttatcatcgtgtattaaggctagtcattccctacctatcccaagctatgtactctgatttcaaatatatcttgtgactaagtctttgtagcctaggttgacctttgactccggtggtcttctgcttcagccaacactggtattacaggtgtataacaccatgtccacggtgtccccgaccacaggtgtataacaccgtgtccacggtgtccccgaccatgctactacttcagggaatattgaattttaggccccaagcgggggaaatgagtgtagagtgctttttacctgatggtttaattactaaatataaatagcatttgaaaattgatgaaagagtccctacctagtgcctacagaatattcttgaagccttggattagcttgtgtacctcaggctcttgtctgcctttaggtgtaacctgcatctgtttagtttttcagggtgagtcaggttgcttttgatctgatgtcttactgttagcatcctcctaaacaatgagtaaaacttaaaattaatggatttttgttttgttttgttttcaagatagggtttctctgtatagccctgctgtcctggaactcactttgtagaccaggctggccttgaattcagaaatccacctgcctctgcctcccgagtgctgggattaaaggcgtgaacgaccacacccggcccaccattggtgattcttaaacatttcacagctttgccttgggggtctttgtacttgctatgcctctgtccattcccccccccccccagtggacaggtggcttaaactttccataccctgagacatatgtcagctcaactgatttcgttcccacattttattaaaatgtccctccccatcaacatcctcttgcctgtttttgtttttccttttaaggcatttgtcagcccagtctattattgtgtagtagaaaattactcagttctatgacaacggggacttagtatggcccctgctctatttcagtgccctaaaaagttcttgacgggcactagactgagtggatcgatggcgaggttcacagttgatttaactttgcactttggtaaagccttctgtcacattgatcggatatatagataagatggttgtgtatagtctgcagatttttaaatttaaggcggcaggacatcaggaaataagcattttaccttagtctgtttttctccagtatagtagaccctggggggcctgtgctcaggtttacagatggactttgggtaactcagagaaactggttatttgtgatattagttatatccttgttactaagaatagggagaaactgttgcctatgatggtaggtggcattagcttccttaggtagcaaatgtaggacagagtccagttggctttgtagaaattatggtgggaggctgttgctagcaccatgactcctagtttgtcttgccacagggtgctctgaaagagatctacatttacaacttttaaggtactgatcttcatgtcttacaggcagatccggttcctaatggcttacgagctttaccaattttttatgcctgcacaatcggaatcaacctcttttccattatgtatactggagcaccgtgtaagtacaaatcaagatgcttaaatgtgaattttaggttatttacaaaactttcattaaatgcccaatttacccctttttgctttacagggctgaaatctcctagaaggtggctggcctgcatccatttcagaaggctgcaggctagtgtatgctgagttaacctagataggttttcaaccagagagacctgctcacattctaaatcactccagacctttcctccttagtcttcacaggatccactgataatatgaccttctccctccctttcttgtgtctatgctaacaatgctggaaatgatgctggcctcaactactgaagagtcattagttaaatctgctcttcagtaatcagccacttagagccgcttgttagatgtcatttttctctcccagttggagccatttcgttttctaaagttctcagtttgcccccctaaactgacttgaacgagaagagttgggatgtgtaactcctggtctaattaattacacttggaagaagaatgtccgcagctaggagaaagcacttgagaggaatataaaggctctggtgttgattgctttcatatggggactaagggaaggcaaggattcagttgtctactgagagatggatagattggagctcgtgaggcagagcagcacggttgtggcatctgggctcatgtgacttgctgggtcttaactacgcaggacccgaggcgtccctacactcattcctctgactgctgcccagggcacactgtgtctgtgtaaacaggactgaagtagcaaagtgattgtccttatgttatgtgtgctctcatcctcaattcttaaaggattttcatgcttgtgaccgccaagtaggtcccgcctctggttcatggattgtgacctgtgtattattaccactgaaatgatgtagtaagtcaccgaacaaaacaaaacagcagggtatttctcacattgtcgttcttgaaatgtcattaaagaaacacaggatgggaccagccttggtgtgggggagggggggccttgcttcttttttttttttttttttttttgccctataagattgtttctaagaaaacccagtcctttcgttcccccttttgacttggaatgtagacaaacttaaactgataaacactaattagacctcatggatattttactttgtggacataactgcctagtcacagttgaaagcagaacttaaaatgaaaagaccggcagatagaaagaacttcaggactgaaggatttcagcttatgtctgattgattcttaaaggctacttcttagtatattctgtctcttttacggtgctagggattgaatctaaggctttgtgcaagctaggctgagctgcggtcccgacataaatagttttgacagtacagtaatgttcccattttataagtgacttactatgcagtaagcaaaatcaagtgagacaagcacaagtgactttgctgggggaagggacattcagacagtggcctgggattcagtgctgtgaatggtctccactctaggatacgccagcagtccctgttgcctgtgtgcaagctgacacttgccagtactgctgatcctgaggtcattgagccaaggggaaagaactggaggacaggtctctctgccttgttactgaactaccactaaacttgtcctgtgtgaaaggcaacatttaagcaagtgtcttcccgtagttaataaccctattttctgttagcttgatgatgcttttgtggagagatgcagttcccccaagagctgcctggtacagtcagtgtagtaactttcctttacagtgtgtggtgtctgcgtgacactgacttgagacactccctttattaaaataagtcatatgtaaatgtaatgtggggcagttaggatgaggagctgagtgcagaaaaggatgctgtgattggttttatagttataggtccttactgtagcgattcttgaagaaagttagcacatgagtccagcaagtgtttcagtggctttggttgctgtgggtttaagatgttcattcacgttttctccatggtctgcatagccagtagcctgatgaaactctggaatggcagcagctgaaacgggtgacggtgacgggctggcttggggaagccctccttcccctcaggagggtttacacattgttgcagggggctgttgccctggggttttcaagatgcaccattttatctcgtagtgctgggctttgacaaacttcctctgtggggtaccatcctcatctcggtgggatgtgcagttttctgtgcccttatcgtctggttctttgtatgtcccaggatgaagagaaaaattgaacgtaagtaatacagtttaatagcgttcccctctccctctactcctctgttcccctctctccccctctctccctatcagactattttaggatagaggaagcatttgcctcaggtacctttgcatactcagatggctgtgtgacagtgtctatacacatacacactgtgtaatgcagacacacttttgcacactatccttgtgctagagctgtaacaacacatgaagaagtaaacactcttagaagtaaccttaagtcattgaaggctgtttttgcagtataatttaataccaagtaagttttatttggtactagtctttgtgtctgttttagtcagtcgttaagatagtttagcagagtccccttctgcctttcagtgtgtggaatgttggtttgtggatacacagcagaacaggaatgcatagactgcagtggctttagaagaatgctgcgtcattgcagttctgaggagccgcccagagctctgtgctcgtcagctgtgcggcacgcacagtgggaatgaagcttccaggactctgacctcatttttgtctcagtctggaaggagagacaaacctcactttaatgctgtgctagtgtgaggtgtctgagccagtaggtgactgctgagctggccgttaggcagaaatactgcctggctcccgggtatgcaagtgtttaagcctgccggttgcagctcagttgtctgtactcaggacctaagagttaggagattccttaggaaggctgactgtttagtcagctgccaccccagggcttgagcccccatttcatgaccaagagctgaagatggttttacacttgtaattataaaaagaaaaagccagcaatggaccagaaccctaaaatacttaatacctggcagttgacagcagtttgtcagcccccatttctgcaagcagaccgtgtgctactgcagggctgggctgtcttgctcctcctcaaggggaagatatattcctcaaataataaagagggcagcgatgttagcttgaattttaactagaatttatacctgttattttgagaagggtttcaggggtggatagagaggaatgtggagcaagatagtatcgtcaaatcacaaatcctctttatgttttaggagaagtaaagtctagtccgtctgaaagtcccttaatggaaaagaagagcaacttaaaagaagaccatgaagaaacaaagatggctcctggagacgttgagcataggaatcctgtgtctgaggtagtgtgtgccactgggccactccgggctgtggtggaggagaggacggtgtcattcaaacttggtgacctggaggaggctccggagcgagagcggcttcccatggacctgaaggaggagaccagcatagacagcaccatcaatggtgagttaactttccagggtttccagtgtctcgtggtggtggaaaggctgctactctgggctgatgcactttgcattgaatgttacctttttggtctcggctaggtgcagtgcagttgcctaatgggaaccttgttcagttcagtcaaactgtcagcaaccagatcaactccagtggccactatcagtatcacaccgtgcacaaggattctggcttgtacaaggagctgctccataagttacatctggccaaggtgggagactgcatgggagattctggggacaagcccttgagacgcaacaacagctacacttcctacactatggcaatatgtggcatgcccctggattcattccgtgccaaagaaggtgaacaaaagggagatgaaatggagacgctgacatggcctaatgcagataccaagaagcggattcgaatggacagttacaccagttactgcaatgccgtgtctgaccttcactccgagtctgagatggacatgagtgtgaaggctgagatgggcctgggtgacagaaaaggaagcagtggctctcttgaagaatggtatgaccaggataagcctgaagtgtcccttctcttccagttcctgcagatccttacagcctgctttgggtcatttgcccatggtggcaatgacgtcaggttagtccacatgactcttagtgttactatttttagacagtcttaccctcctgtgtgtactgctctacttctggggggacactgagtaatctagacgggatgaagtggtagtaataaagcaacaggaagttcacttggattgtaagagtggttttttagctttatttctagacaagataaacagatgagaatgagactttggtaaattgggacttcagtgatgaaaaacttaggatcacggacagccctgagaatagacttaaggggttattagccttgtttctctggccagaaagcttcattggagcctgagacttgctctaagctacacgtgagaggaacgagactaccagttacatgtatgtgccttctgtcatagccgctgtgtttggcttctgtaggatggtttgctaagtgcagtggtcagtcacttaacagattgggtctcgacaagaagtggttctgcctaaaaagtcatcggtgcccccttttttcttccagcaatgccatcggccctctggttgctttgtatcttgtttataaacaagaagcctctacaaaagcggcaacacccatatggcttctgctttatggtggtgttggcatttgcatgggcctgtgggtttggggaagaagagttatccagaccatggggaaggacctgaccccaatcacaccctccaggtgagtagtgaatcccgccctcggtagagctcaagcttttcaggagatggagttgtgtggagggcagcacgcgggtctccagctaaaggagtgtatggcagctgctgctgttcttctctcagttgatctgaacgtttctgctgcacttactgtctgacttgtaaatcagtcagtctgctcagctctagtgatcatgtaatttaaattttctgagaaagatatagtggagtaaataattatatacatggctttgatttgggagctaagaccttatactttattcagaataaaagttccaacatctttgtttgctttttgagacagggtctctgtcttggctggcctggaattcactatgtagagcaaactggccctgatctcagaattcatctgcctctgctttccaagtcttagcattaaaggcatgtgtcactgggcatactccagcttttaaataaatcattccagaaatacttaatcctcagatgttaggaccttggctcaatttaagtaggtttttggggttagaggagatgaccaggctttgtcactgagtagaacaaagagagattagaactgatggctttagctagtgttggtttctcagaagactctccattgttgacaaacatccctttgtatcaacagtggtttcagtattgaactggcgtctgccttaactgtggtcatcgcatcaaacattggccttcccatcagcacaacacattgcaaagtaagtggagtcgggacgtcatgggcccttgaagccgatcagtagcttggggatgtccatggttcaggtggatctggggggtggggggtgggggtggggtcctactacttgtggtagtaaatacactggttttaacaagtttgtgaggcttatttgtaagggcagtctcttggtgaaagcatatagacagggcctcttgggcctgtcgtgctgagacattgaactttaggaagttgcttggtgaacgtataacatagttattggataaagaacaaactgacttccttggaagagctgaatctggtccaggctagggcctgccaagtcactctctctgctggggtggtgttgggtcacataccagccgccctctagagtgattgttgagaaatcagaaatttagcttacacaaagcagggaaaaggagttttgtcatattttagcacatttagcaacagatctaatggctgaatatttatatcgcttttcttcaccttgccatgggtaattttagcttgttagaagttagcttctggcttgtgtcacatgcctgtaatttcacctcttgggattctgaagtaggaggatcacaagttcaatcctgtttagatgacagtgagaacaactgtgtcttttttccagacaaactgctgggttcatcgcttgtctgggttccctgtcccaagtgtctttttgctgagtaatgtctggtctgtttctctcctaggtgggctctgttgtgtctgttggctggctccgatcaaagaaggctgttgactggcgactgtttcgaaacatttttatggcctggtttgtcacggtccccatctctggggttatcagtgccgctatcatggcagtattcaagtacatcatcctgccagtgtgacgctggggttgaaagctgtgtcagtgtctgggaccattgtacacattcctgttcctaggagaacgctcacagtgttgctgaagacaggcaagggtcttaaaggagccgtgggaaggaagtgtaatttacactataattgcttttgtgctaaatatgacttatctcaaaattagctatgtaaaatagccaggtttccattgattcattccaaggtcccttttctcctgggctatgaattcctgtacatatttctctacttttgtatcaggcctcaattccagtatgttttaatgttgtctgtgagataacttaggtgggttctttttaaacagccaggcagagccatttgatggcatgtactgctttgtcggcctcaccagcttcttccccaacatgcacagggatttaacaacatgtaactgaagcttccctccctcatagtctctcatagaaatagtcacggcactctgctccctgtcactagtggcaggttctgttgatgtgtgacaacttcttagagggccgagaatctttggcacagtggaaatataagtttgtagtaacctctttgcaaacagttcacggacatgttgctaagaagcagggagacaaagccccctggcggttgtggttattcttctgagatttctggcagtgtgggatgggtgaatgaagtggaatgtgaactttgggcaaattcaatgggacagccttccatgttcatctgtctacctcttaactgaataaaaagcctacagttttta

SEQ ID NO: 110 - DNA, 3273 bp, Mus Musculus
tatatgatggccgccggcgcgcgttgcgtgttttcacctctcgcctgctgaggcgcccgcggctgcttcacgagtgggtagagagtccctccgtgctgtgcccggtgttgccgtcctgggttgtgcgaccgtggctcgagcctgcctcagtctcgttcttctggtctctctgttcggccctcagtttcctttggatgaacttgcgtcctttctctaatccgccatggaattctgctccgtgcttttagccctccagagccaaagaaaccccagacaacagacgcccagacgcagcagcgtatagcagtaactccccagctcggtttccgtgccgtagtttacagtatttaattttatataatatatactatttattatagcattttgatacctcattccgtttacacatctcaaaagccgcttagtaattctcttattatttaaagaaccactacattagagaatggaatctactgtggcaacgattactagtaccctagctgctgttactgcttccgctccaccgaagtatgacaatctatggatgctcatcctgggcttcatcattgcatttgtcttggcattctccgtgggagccaatgatgtagcaaattcgttcggtacagctgtaggctcaggtgtagtgaccctgaagcaagcctgcatcttagctagcatcttcgaaactgtgggctccgccttgctgggggccaaagtgagcgaaaccatccggaacggcttgatagatgtggagctgtacaacgaaactcaagatctgctcatggctggctccgtcagtgctatgtttggttctgctgtgtggcagctcgtggcttcgtttttgaagcttccgatttctgggacccattgtattgtcggtgcaaccattggtttctcccttgtggcaaatgggcagaagggtgtcaagtggtctgaactgataaaaattgtgatgtcgtggttcgtctctccgctgctttctggtattatgtctggaattttattcttccttgttcgtgcgttcatcctccgtaaggcagatccggttcctaatggcttacgagctttaccaattttttatgcctgcacaatcggaatcaacctcttttccattatgtatactggagcaccgttgctgggctttgacaaacttcctctgtggggtaccatcctcatctcggtgggatgtgcagttttctgtgcccttatcgtctggttctttgtatgtcccaggatgaagagaaaaattgaacgagaagtaaagtctagtccgtctgaaagtcccttaatggaaaagaagagcaacttaaaagaagaccatgaagaaacaaagatggctcctggagacgttgagcataggaatcctgtgtctgaggtagtgtgtgccactgggccactccgggctgtggtggaggagaggacggtgtcattcaaacttggtgacctggaggaggctccggagcgagagcggcttcccatggacctgaaggaggagaccagcatagacagcaccatcaatggtgcagtgcagttgcctaatgggaaccttgttcagttcagtcaaactgtcagcaaccagatcaactccagtggccactatcagtatcacaccgtgcacaaggattctggcttgtacaaggagctgctccataagttacatctggccaaggtgggagactgcatgggagattctggggacaagcccttgagacgcaacaacagctacacttcctacactatggcaatatgtggcatgcccctggattcattccgtgccaaagaaggtgaacaaaagggagatgaaatggagacgctgacatggcctaatgcagataccaagaagcggattcgaatggacagttacaccagttactgcaatgccgtgtctgaccttcactccgagtctgagatggacatgagtgtgaaggctgagatgggcctgggtgacagaaaaggaagcagtggctctcttgaagaatggtatgaccaggataagcctgaagtgtcccttctcttccagttcctgcagatccttacagcctgctttgggtcatttgcccatggtggcaatgacgtcagcaatgccatcggccctctggttgctttgtatcttgtttataaacaagaagcctctacaaaagcggcaacacccatatggcttctgctttatggtggtgttggcatttgcatgggcctgtgggtttggggaagaagagttatccagaccatggggaaggacctgaccccaatcacaccctccagtggtttcagtattgaactggcgtctgccttaactgtggtcatcgcatcaaacattggccttcccatcagcacaacacattgcaaagtgggctctgttgtgtctgttggctggctccgatcaaagaaggctgttgactggcgactgtttcgaaacatttttatggcctggtttgtcacggtccccatctctggggttatcagtgccgctatcatggcagtattcaagtacatcatcctgccagtgtgacgctggggttgaaagctgtgtcagtgtctgggaccattgtacacattcctgttcctaggagaacgctcacagtgttgctgaagacaggcaagggtcttaaaggagccgtgggaaggaagtgtaatttacactataattgcttttgtgctaaatatgacttatctcaaaattagctatgtaaaatagccaggtttccattgattcattccaaggtcccttttctcctgggctatgaattcctgtacatatttctctacttttgtatcaggcctcaattccagtatgttttaatgttgtctgtgagataacttaggtgggttctttttaaacagccaggcagagccatttgatggcatgtactgctttgtcggcctcaccagcttcttccccaacatgcacagggatttaacaacatgtaactgaagcttccctccctcatagtctctcatagaaatagtcacggcactctgctccctgtcactagtggcaggttctgttgatgtgtgacaacttcttagagggccgagaatctttggcacagtggaaatataagtttgtagtaacctctttgcaaacagttcacggacatgttgctaagaagcagggagacaaagccccctggcggttgtggttattcttctgagatttctggcagtgtgggatgggtgaatgaagtggaatgtgaactttgggcaaattcaatgggacagccttccatgttcatctgtctacctcttaactgaataaaaagcctacagttttta

SEQ ID NO: 111 - protein, 681 aa, Mus Musculus
MESTVATITSTLAAVTASAPPKYDNLWMLILGFIIAFVLAFSVGANDVANSFGTAVGSGVVTLKQACILASIFETVGSALLGAKVSETIRNGLIDVELYNETQDLLMAGSVSAMFGSAVWQLVASFLKLPISGTHCIVGATIGFSLVANGQKGVKWSELIKIVMSWFVSPLLSGIMSGILFFLVRAFILRKADPVPNGLRALPIFYACTIGINLFSIMYTGAPLLGFDKLPLWGTILISVGCAVFCALIVWFFVCPRMKRKIEREVKSSPSESPLMEKKSNLKEDHEETKMAPGDVEHRNPVSEVVCATGPLRAVVEERTVSFKLGDLEEAPERERLPMDLKEETSIDSTINGAVQLPNGNLVQFSQTVSNQINSSGHYQYHTVHKDSGLYKELLHKLHLAKVGDCMGDSGDKPLRRNNSYTSYTMAICGMPLDSFRAKEGEQKGDEMETLTWPNADTKKRIRMDSYTSYCNAVSDLHSESEMDMSVKAEMGLGDRKGSSGSLEEWYDQDKPEVSLLFQFLQILTACFGSFAHGGNDVSNAIGPLVALYLVYKQEASTKAATPIWLLLYGGVGICMGLWVWGRRVIQTMGKDLTPITPSSGFSIELASALTVVIASNIGLPISTTHCKVGSVVSVGWLRSKKAVDWRLFRNIFMAWFVTVPISGVISAAIMAVFKYIILPV

SEQ ID NO: 112 - DNA, 35089 bp, Homo Sapiens
atggatgagattagctacctgcagggcatggtaggaacaggatggaaataaagggaatgagggggaatgagacttctaggaatatctctttttgtttattttattttatttttagcagagatgtgggttccttatgttgcccagctggtcttgaactcctgggctccagctatcctcctgcctccatctcccaaagtgctgggattacaggtgtgagctaccgcacccgatcctctttttgttctgaactgacttttaaaatcattttaatatttcacatctcaaaaataaatacaaataaaactcacaaggacagggaaaacgctaaagttgaacacaagcagaaacaagcaaataaaatgtaccctttgacttctatcttaccactttgtagtaaaaataactaatcccagtaacatgttaaacattttctagtttaacccttgcagcatccctaaatggtaggtacgatgactagtctagttttacaaaaggggaattgccctttaggaaggaggcaaaggaagctcccaagctcccagggacttgaactcagattttgcaccagatttatattagatctcaattccgaaatcctattacatcctcagctctgagccaggcacagaaggatgatttagtgtctctgagttccaagaatctacaacacttaaaatctcagtgacaaacatttaacatcctgaggttatacataagggaatgaataattcctttatgattcataaagatttaaagaccaggccgagcatggtggctcacgcctgtaattccagcattttgggaggccgaggtggctggatcacaaggtcaggagttcgagaccagtctggccaacatggtgaaacgctgtttctactaaaaattcaaaaaatgagctgggcatgatggcgggtgcctgtaatcccagctactcgggaggctgaggcaggagaatctcttgaacccaggtggcagaagttgcagtgagccaagatcacaccactgcactccagccctggtaacagtgcgagactctgtctcaaaaacaaaacaaaacaaaaagatttaaagaccaaaaagattttaggaattctgggcactctgtgtgggctgctttcttggaggatataggattttaggtaggtatagaaaaggagacagagaattccggagagcagaagacacttggggcaaagggttaaaaggggcttggcgtgttaagagcaaaggagaccggcttctgcatgggaacgaacaacacagaaggacgtccgtcacgctgctggatgactcttaatataagagttccaagtcaaggcgaacatcatggaaggaagaagtccacaatgaggctggggtgaggttggtaaattccagtccctaactttagcccttagacagctacatttagatattggatatttgccacccctttcaattactgggctccaagagattacctaggagaaggcagactctatattctggatctgcgactaaaaaatgtttttgcacaaaacgtttgctcctttagttgtttttgcttttctcttttgtctctactttctaagccactccctgtttgctgagctgaaaagcaagttctcagccctgctgtctctttctaaagccagcttgcctgtagcccccaggggtgaggagaggtgttagaagaaaacacttctccccttctgggtcccttccgcagctggagttggtgcacagtggggataatgagaaaaaataggaaagcaaaaaggctttgtgggaaaggaaggtggccacataccaacgctgggtctagctggagggcaagcaggaaacatgaacaaaatgaaaacatggagaattcctatcagaccactgcttcacggcatcctaagttttaatcaggacgaatgttcagataaacccaaaaaatccttgaaacgaggacaaatgcaacatttggccctcaagtcgctgcctcccattgtcatccccttttgaaacaacaaaaaatatcacacatgtctgacctgcctggccaacatggtgaaaccctgcctctactaaaagtacaaaaattagccgggtatggtggcaggtgcctgtaatcccagctactcgggagaggctgaggcagcagaattgcttgaatctggaaggcggaggttgcagtgagctgagattgtgccactgtgtgtgtgtgtgtgtgtgtgtgtgtgtgtgtgtgtgtggtgtatacacacacacacacatatatatctcccacatctcccacaagataaagtcaatatctggtccgctttgatcgtttcctccctgtcatcattgcccctgtgtccctcctggcacctctgcccaagcctggtccagcagccccttgccctggattcccacaccaggctacagctgtccatccacgcccccatcccctccgagaacacgcttcctcctgcagcccgcttcaggaccagcccacacaccacctcctccaggggcactggggttcctggaaggtgctggctcctcctcccaactccaggcaccctgacgccactttgtcagtgtggttttcacatcctgtcctagcggtatgtttgtcttttcgcccccagattcacagcttcctaagtgaaggagccaagtcttgctcttttctttaccctagaacaagatacagtttctgatcatacttaatatttgatgaacagatgttttcctttaaacgtttaaagtttaacttttaaaatctcagtaagaaatacatctgacattaccacccagactcatacacacatgtcactgaatcaaaagtttcatgaaataatacttactctgttggatgcactctgatattttctttaatttcattttttaaaaagtgcttgtggggacttgtaggtggaaagccatggtcctaaagtgtacagagaagctgtcattgctaaagtgagagaagctttgcttccaagctaggatcaggttaggattaaactataaacagatgagggcttctgtttgctctgatctgcagactgagagagtctggcctcattaagaaacagaagccaaggcggggcttactgacgatgatggacttcaagctcctagggcctgctctttgcagctttcctgttcagtactttatatctttccttcactcctttaacatacccatccctaactcacaaagattccccagactccacctggtaccccagcgatattgtgtgcacagctctacgatggctcttgtcacactgtactgtaatgcaaatcttttttaggtggctagctcttcaactgagctgctggagggatcccggccagggaaatgctggccaaaaagagtgtgtgaatgggaggagaggaacttttgcatcttggggtctagaggtgcccatctcttccttgttgttgcctgggcagggggtcaccactggctctggagccacagcggggaaaggcaggccagggtacaccgcggtggagcagaagggcagggagcagtgatgtaattcaattacagaactcggttatcccttcactttgtgtagaaacgtcaccacttaataaatttttttgtttgtttgtttgagacagagtctcactctgtcacccaggctggagtgcagtggcatgatctcagctagctgcagcctctgcctcccgggttcaagcgattctcctgcctcagctggagagtcctactctcctgagtagctgggactacagaggtgcaccaccacacccagctaatttttgtatttttagtagagatggggttttaccatgttggccaggatggtctcgattttctgaccttgtgattcgcccacctcggcttcccaaagtgctgggattataggcatgagccatcgcgcctggccaccacttaagaaattaatagtcccagctacttgggaggctgacgcaggagaatcacttgaatctaggaggcggaggttgcagcgagccaagatcacaccactgcactccagcctgggtgacagagcgagactctgtctcaaaaaaaaaaaaaagtaagaaattaagaaaataggctgaaggtggtggcaagtgcctgtaatcatagctgctagggagactgaggcatgagaattacttgaacccaggaggcaggggttgcagtaagccgagatcacgccattgcagtccagcttgggtgacagagcgaggatccaactcaaaaaaataaataaataaataagccgggcatggttgcacatgcctgcagtcccagctgcttgggaggctgaggcaggagaatcacttgaacctgggaggaggaggttgtagtgagcagagatagtgccactacactccagcctgggcgacagagcaagagtgtctcaaaaaaaagaagaagaagaaacaaaaccaaaccaaagaaaatgcatgactgttcctcttaattatttacctagctctgttttgttacatattgtagttgtaacccatgagcaatagataaaatgtcactagatagaatgtttgtggccgggcacagtggctcactcctgtaatcccagcactttgggaggccgaggcaggcggatcacctgaggtcaggagttcaagaccagcctggccaacatggtgaaacccctgtctctactaaaaatacaaaaaattagccgggtgtggtggcacgcacctataatcccagctactcgggggggctgaggcaggagaatcgcttgaacctggaaggtggaggctgcagtgagctgagatcgtgccattgcactccagcctgggcaacaagagtgaaacgccatctaaaaaaaaaaaaggtaacaaaaaactctccctcaaattcgtgttgatacctaattcccaatgtgataacatttggaggtgcggcctttgggaggtgatgcagtcatgagggtggagacctcatgaatgggattagtgcccttataaaagagaccaccagagagcttcctctccccttccttcatctgaggacacagtgagaagccagctgtctatgaaccagaaagcaggccctcatcacacattgattctgctggcgttttgatcttggacttcccagcctccctgtgagaaatgaatttctgttgcttacaggccacctggtctatagtcctctgttacagcagcctgaatgaaccaagacacccatgtacacatttacaaacaaaacaagtacggcctagcccacattctcaggagcttacaattttcctttaagtaaagttacgtgggaagaccctgaactgtggagcaaaaagggcctgcgttgagactagctctcctgcttgtcgtgctgtggtcttgagaagcacctgaactctttgacccctttctcctcatctgtggaattagggtaactatgccattccccaggcttgctaccaggaggagaatgaggggacagacttgggagcagctcacattcctgaagaagttaacgttctaaggtatggtggtgacaagccggaccgggcagaatacattcttcccgtggtgaaacagaggaaaataaagctggacagacagtgaagggccctgtcatggaaagctccagccagacagagcggtctggagtttgttttgcaggcagtggtcatggggaaaggctttgtgaaactcacggttcagcggctgagtctcaccgcctgtgtagcttgggtggggtggagtgagactggaggctgggaagcacctgagaggtgtcaagggctgccgtgtggacttagcctggggcagtgggaggggtaggggtggaaggcaggccacaggagtgaaaatagggccccggtttccagggcgtcgttccccctgcatcttgctctctgcctttctcctcttgtccttctgtctccacccctatccccatctcccaaatgcttcagagcataaaggtgctgcccagccaaaatcacccgcacaaactccaggtaaacttggtctgggcagctttgagtgggtcatgagtggaggaagggcaggcccactctttccttagtatatgagtgagaaaagcgaccgctggttagatctcacaggaaaccagagccttgtggcagcacctgacttcaggtgcagcacagcccacggagtgagaagctgacacctctgtgcctgctgaggcaggctgctccttctacaccaggccagggaaatcaggtcacccactccaacagtctgccggacgctggggactgactgctgcctctggggcatccaccacaaaggattcatggactcactgacagggccaggcacctggctaaggatctcaaactggtgcggcccacgggtccattcaatctatagatgggttttgtgcggccaacaccgtccttcttgtctacctgttgtatatgcattctggccttgcccctgagtttatgaatttaccaaccccaccttagcagggcatgaagaaatgcaaaggcgctccaggagcttctgattttgctgggaaaacaaaacaagtatacaggcaaagagggaggacaatggcagacccaatgcatggggcagtcatctgcatttctgagttgaatttagagaagagatcttctcccacagatgataaaggggtgcatagaggtgaggtgcacacggcctgggggaagtcagccctgggatgagcatgggagagggaggttccccagtggggaaggacacgagggtatggactggagaaaatctgcatggctgggccccattccacaaacagagggccccgagaggtgtctgcgtaagggagtgatgatgaaggcacatggggagagtgtacaggactgggccacccaggaatcaataatctggaaaaggtggcagagtggggagctctgattcaggagaggcactgctttgggagaaatctcagaggatgtaaagactgatgccgtgtggaagttggattcaaaggacaccaggcttgaagcttcagagtatgtaagagaggtgcagctctggttattgaagcaggggaatcatgagagggaggttgctcagggtgggaggtgagaagctgagacattttggtttaaatgttatatttaacagaagagatatgcagcttacattgagagctatggggcaggacatggaggcctggtggaaaagtgcatgtggaggtgatgatttagggcagggatggattcggtgaaaccccgaaaaaaatgtggagggacagatactggggataaggaaaaaggaaattgttgtggaactggagaggtggggtgtacacaggtgtcaggggagaagacagtcctagggaagtgctctattagcattaccaattgcagaggtttcagaaagagtgctgagaagaggctggggcgtctgaagctaaggggcaacaagattttcagcaggggtgcggaaacgggcaatacctttcagggtagaggagagcaggtgcaggggaaggaaggtggactggtagagactgctatctcagggaacaggcagtggaagtgatgggtaggaagaaaaaggaaggcatagatgtttggaggcaaaagggaaggagacagtgagaaggaagtgctgaatttgctgaggacaaaggagaaaatgagacagaaagaggcagatgaggtggacggggtagacggagatgctaatcttggatttcacaacaggctgcatcccctatccctccactgtgtgccaggcctaccagcctgcacctggccccagtacccccaggccttggtctttattcttgtggttaggcagcatggaagtcaggcaactggatggaccaggcattctctgggaatggccaagggtgttcaaagcccagggctgggacccagagcaccagcaattattccttttcccgtttgctactgattcttcttttcttccttcatcatagggcccatcagagctggtggctagaaatcatccagagggctgtaaacattagtgaggcactgagtggtccctgtttcggccaaggcataagcagacagatgggaagtgaaagtgggtaaccactgaaaggtgagggcgagggctggtttcatcatcagcgccgctggcaacaagagctattaagagccagcctttggcgagacagtaaggaactacagatttaaaattcctagcagcaaagctgtgtctcttcagggtttggttacccatgctgatcccataacaaccaccatgccaatggcagggaacatcaacaagcaaggtggtgaccatgaggatgaccttgccacaaaaccaaccatacaccccacacccctggggaaggaggcacccaccagctgggccctgtggggctgttccagaaagtgcaggttgggaggaggatggagtgaggaaagaggccagggtctaaatggaaagggccagtgaaagggagagacaggcttgttaatcaatgaccactacagagttggaaagagaaggcaaagaaaatgcctcactgctgaggatcagcgtccaaagatttcattctactgagagttaaagagatgccaaagccgggattaatgttggcaaaggagatatggatgggccatgacaccaccagccatatgtaatcagaaggggatcaaaaaacatccccagccttgaaattggcattttctcttatgtgctgggtggacatttggcaatatcatataaaatgaaaatatttgcatagcccatgacccagagagtccacttgcataaggacgtgctttataatggtctattccactgcagataataaaagaaggcgtgcaagaagatctatatgcagtgacgtgcaaaggtatcaagaacaagttgcgaaaccccatggtatgatttcatctgattaaaagaaaaaaggtatacactatatattatagtgaaaatacctatgtgtgtgtgtgtgtgtgtgtgtgtgtgtgtattacaagtaatgattaaaagtagttatgtcggggggttagactagaaagttgagattctaaggaggagcatttttcacttgatattcttctctatggtatagtttttacatgagcttttttttttttttttttttttttagacagaggagtctcattttgtctcccaggctggagtgcaatgatgtgatctcagctcactgcaacttccatttcccaggttcaagagattttcatgcctcagcttcctgggtagttgggattacaggcatgctcggctaatttttttttttttttgataccgagtttcgctctcgttacccaggctagagtgcaatggtgtggtcttggctcaatgcaacctctgcctcccgagttcaagcaattctcctgcctcagactccctgagtagctgagattacaggcatgctccactatgtctggctaatttttcgtatttttagtagagacggggtttctccatgttggccagactggtcttgaactactgacctcaggtgatccactcgcctcggcctcccaaagtgctgggattacaggcatgagccactgcacccagcgagcatgtattatttttataataatttttaaaaatcttgagctcctcttgccctaaactatttcccctattagtctggttgtttcggtgcccatatattatgaaataatcagaatacaagtctgataaatatgaattctagtggggacaatggaatagggtatttgcaattgaagtcactgcatgaagtactctctcccttgtccctttctctcccttctctggcctgaatgtcccatccctatccccatacctgtaagtcactcctctggcttaaatggggagttaacacagggtggtgggaagtatagtagacttggagtctctcacgcattgcctgccagggcccaccgtgcaggactccaggccctactctaaaacttgctacttgcccgactgcaggctctcagaccctcatttccctgtgatagggtaaaaaaaatacttgctctgcctacatcacacagatgtgaagataaaatgaaacaatgcctttgaaggtatctggaaacaggagagtgagtcctatatatatctatatatatgtgtgtgtgtgtgtgtgtgtgtgtgtgtatatatatatatatatacacatatatggtttttataaatcagcgttaacatttgattttataaccatcattaaaaagggagaggtaaatgggtggagagggaggagtgaaaaaacaaaataaaaggtagaggcagtattcaaggtcacagttaaaaatttcatattccctgcaggtggtaggtgctgaatggttgaataaatgaacagtcctaaaatggatatattttggggcaacagtaagttgcccccaggaagaaaatcacttttggaaaataaaactggcaagaatctatgctaaatggatgagaccagccacagaagcacttcatcctaaaagatggtaaaggtggtgtatacaaaattaggccgggtgcagtgggttatggctgtaatctcagcactttgggaggcctaggtgggtggattgcttgagccctggagttcgagaccagcctgggcaacatggtgaaacccagtctctacaaaaaatacaaaaattagccattcgtggtgggatgcaactgtagtaccaggtactggggaggcagaggaaggaggatcacctgaacctgggaggtcaaggctccagcgagctgagattgcaccactgtactccaacctgggcaacagagtgaggccttgtgacaaaaaaacaaaacaaaacaaaacaaaaaacccaaccaacttgggttgggcagggtggctcacgcctgtaatctgaaaaccttgggaggccgaggcgggtggatcacttgaggtcaggagtttgagaccagcctggacaacatggtgaaaccctgtctctactaaaattacaaaaattagctgggcatggtggcaggagcctgtagtcccagctactcaggaggctgaggtggcagaattgcttgaacccaggaggcaagggttgcattgagctgagattgtgccattgcactccagcctggatgatggagcaatactccgtctcaaaaaattaataaacaaataaaaacaaaataacaaaactgggggatacccaaacccaattaatattcaaataaatgcttgttaaatgccagggatagtgctatgcattttacttatttaagtctcataacaaccctattatttccactttacagaggaatgggaggcacagagaagttaagcaatttgcccaacctcatagcatgtaaatggtcgacaagattctaatttctaatagtctggccccaggtcccatgtgctaaactatcccttacctagaacagtaggaatgcttgctcagaaaaacaggacttaaaatagaaaaaagtggtgttttttgaacatctgactgaaacggaatgtgttaacatattgtttctaaacttaccaggtagcaagagtcattcttgtgattgcttcccaaactgcagcatgcttatgaatcatatggggatcttgttagaatgcagattctcattcagcaggtctggggtggagtgaaggctctaggcagagggctagagggtcccatcattggagatagacttccccacggaaaatgaagaaactgggttctgctcagaacctcagtctcccatgaggcagttcccaatagcagaagcctctctttgagtgccccaaacacctgaatttctggaccaggaaagcagaggtacagccccaggccctactccctccctgaaaactcagctttttgtgcccagcaagctctgaggtggggggtcttgttgggaagctttctcttgctgaagggatcagacaagtgaggggcactgaccctggaagaggaatgctggggagcaagagcctcggcagtggtggagtggactgtgcagtgagtggcctggcacagtctcctgtgctctggtctgtagagagagcgaatgataaataaggatgtactggaagatgaggtgtgtggttcatgtccagaagtggcaggtctgttgggggaagggagagattgactttgcctctttggctgttgtattcatggccagtcctcagtgtgaaactcaatgcaagaaggggtttgtggcccataaaagcatgggctggtcaatcttgttgatccactagatccatagcaggctatttgttgactgaacagacgaatgaatgaaaggctagggaagccatacaaagccagatgctgttaccctccacctcctcctgggatgactttggggatgactcacgtcctgctgccccctcactttctcagcctaaaaccacacatcctggactgtgcgggcagcgagctgacccttccttttctgctgtaggatcttcattacacaaagttcctgagtttccagcaagttgcctttcttccctgtttaagagctgagaaaactgggccttggggaaagcgagaagtcccagtttaagtcaccagagacgtcttcctaaagaagtattcaggatgctgtgctatccagaagctggctccagagacacctggaccatttcaagctctaagaactgtgcttctgttccctctgcctggctcctatgccatatcacacccacatgtgtgaactcaaagccaaagggaagagaccaggccatgtgcagccaggacagaggcatgtaaaatctagagagggtgggccaacctcccatactcctgtgttggcggagaaatagacccaccagtttgtctggcacaaccaaaactcagctttcttgccatgggatgctggcctgagaccagtcacaaccagtctcaaccagtctccatatcagggcttggctgtctgggtgcttgaaagcacccttcccccacccggatcccaagcatcccttggactctgccaggacagagccacagatgccgggggaaatgggaaatgactggagacacagaggacagccacattcaaagctggtgggaaagtggtggtggtgacatgtggcccttgcctgaaacattattttgaatttatttcctgtaggaattgactacaggtgggttttgtcttgcaagataggtttcctttcttaagaaatctcaagagaacagagttttcagtaactctaagacacggttaggccactgcaacaactttatttctggagagaacatgtgctctggcttcctgcctcttcctactctggggaaactggggccaatctcgaagactgatctcctagaaatgtccttttttattccaacagggtttgatgcagctcaaaatacaggctgtaaaagcaacagagttaataaaaaggagggggaaagaaggaggaagtaaatgtgttaagtgcaaataagagttggcacctagggcaatcatacttgcctcagtacttgctggcatcctgggaaaaggcacttacaatcttgaaatttgttaggttcttcgcagctttaactgccgcttccttctctgtgcctccgtttctctgtctataaagtaaggggaaaatacctcatctgagatttattgagagcatcacctgagataatccatgcagagcacctgaaatagtacctggcacacagtaagcattcaactgcatcacagatattattattattattattttgagatggagttttgctcttgttgcccaggctggagtgcaatggcacgatcttggctcaccgcaatctccgcctcccgggttcaagtgattctcctgcctcagcctcccaagtagctgggattacagccatgcaccaccgtgcccaactaatttttgtatttttagtagagacagggtttctccatgttgataggctggtctcgaactcccgtcctcaggtgatccacccgccttggcctcccaaaatgctgggattacaagcttgagccaccatgtccagctacaggtattattattacctcattcatctggggatggggagggcattggtgggtggagaggagctggttctcctttactccaaggctcctaccttctcttccctggatgttctcgcccctgctcccatgcaagtcctcacagacggcctctgaagccgcctttgttcctggtctggttccacaacgttcccatgcccacttgagctccctctactccaagtagactatttccaggatgagtacttcaagtacatcgaacagtgacctcaaatgcatttccttgactgtgcctctctgaactaaaaagtgcagaaatgtcattgcttccttcttttgtctggtcttccacagggctaggttgggatccggggggagagtagctttcctagctctcagcagctcaactccaccgaattagtgaacgatggacatgtccccaagaggactctaaacccacagtccccaacatggtgttctgcagcatgccacaggtcatcttgttctgtcctctctgagggtgaggttggagagggaccctaggctcacaggctcagtgacagtgactcaccaaagatcctgtgggcagtcagggtctgggccaggccagtgagcccattcatatggcatgagccacaacactgttcctcttcctccggcagcagcccgttttgcgtgtcccctcactatgagccgtgggagaaatttgaaagggcttggatcagagggcagggagaagagggtggtcctgacatctgacacatacttcattttaaacatgggctatgtatgacaggccttcagctagttattgaacaaagagaataagagcccttttacaagggctttacatatattcattcatttggtcctcacaacagcactgtgagttagaagtctcaatctcacccctttacagatcaggaaactgaggcagataatttatttgcctatggtcacaggactagtgagtgacagagcaggtggtttggtcttacagtctatgtgtttaaccactacaccaaaccacctccctaagatgctagagggggtttgtgccaatgcctggattctaagagattagattctctttaggatctctgacctgtttcctcagcattcagagataaggccagaaacaatgccatttgtgcacgaactgacaactgacggtcctcctacctcctatttctatttaaaaggcactgtaacttctttccacaggcagatccctacctctcctcccttaggggaggacgaaggtgtcccagccaaggaagatcctggtctccaagggctgtaccctactgatccggaggcaaagcagtgagggcccaccccaattcctcacctcccattctactcttcggcagaagcatctcagtgttggaaagataaggatttcttcctaaaaaggaaggattacactatatcagagtctgaagatacagttttcatttgcaacgcaagggaattcctttgaatctctaccttatgatttccctgcaaacccactccgatggggctggagagtgctctctcactcagatgaatctctcaggggttgtccagcaggtgtttgccaacttgaagagctacctactatcacagacctataaaagtacgcctgtggacagactgaaaacaaacaaacaaaacacacacacaaacacacaaaacaaccgcacactgggagaagttctaggcaatttccttgcaaataactgctttgaaaattactgttttaaattggcagaacactaaggactttgaacagatcatcccttttactcaatgttttcataaccttgaagtgaaggtggagggagcagtacgttttaaggtgccaggattacactacggggtcagtgctcccggatatgaactttctttttcagaccgaccttgggacctacagctttgtaagttactcatacaactccatcaaatgttacaggtaggtcagaggacattcaggttgtttaagcctctataaatgactcaggcagcaacaatttacaacgtctttgtttctgctatgcagtgccctcctgctagagatggcaaaaatgtggggagggcttcagagcattctaagcctggtatttctggctggaatttttaaatctcactacaatcctgacaagagaccacgaccttaatctcccacggcatgactggttagtcttgatcgtaagccatataatcaacacccaaatgtgcataacacatctaaataatgtcaaaactacactatataccacgcaggggaccagaaatcaatctttacctcaaaaggataagcttccaggatgcaataacatccccttccacccttttctacaccctaaaacagtaatattcacggtaacagcaaagcggaaatcagcttttcctgaacatgtactgaattctagtcacattcacacacgttaattcatttaattccagccacaaggtaggcagcctctgttaacattttacaattgtgagaacgcagagatctgggactggctcaaggtgacacactgcagcaaggagtcagaatttgaatccgaagcagtgtccttccccctcgcaacagctgcggcgttacaaacacaggtcagccacggagaaattaatgacccacagccatccttgcagctctgcgccataactggggagacaagctggttcccgtgactcttcagtctgttttcacccaagtgcatgactgcgggagcaaagcgaccacgtgagcatcccccccccacccccccgcttcccccaggcgagggacagtgccaggccaaggacaagtcacaggtgcaacaacgtgccagaactggatccggagccccagggcgcaagatctcccgcagcgtcacccggcagagggacgggtgtggccaccgggcgcggcaggtcctgcgtgcgctgaaagtgcggctggaggcgcggacggctttccggagccccgagagaggagctaggaatgactttggtcgcagcctctgtaaccccgcatgacggcctctagggggacagcgaggtccccctcgatctctggctgtaatcagccggcggggccagacggtgccgagactccagggcgaggccgcagggagggggctgtcccgccccacgtggaccggctccccgctgggggcgtggccgccgaagcgggccgggccaatgagcgccaccgtcgggctcacccggctgggcacgccgggccgaggagggctgcgtcatgccgggggcggggcttcggggccggcgcgaggcgcggcggggtcacgcgggtcgctgcgcgggctataagtaggggccggcggggtgctccgctggagtgatggctgccggcgctctctgcgtggttcttcttctcggccgctgaaacccccgcggctgcttcctgggaaggtcgtgagtcccgctgagctgtccccggtgccgccgacccgggccgtgtgcccgtggctccagccgctgccgcctcgatctcctcgtctcccgctccgccctcccttttccctggtgagtagtggcgccgcctcgtaaaggctctttcttctccccggggccgggcgcggacgccgtggcgctggaggcggacgccgtgggcggcgcggctggcttctctcttcgccgctggccgcctccactccgcccgtctgcccgcccgcgggcctttttggcggtccccgggcggcgcgcgcgggaacggcccttttccgattttcgcgcggagggcgcgcgcgggctggcagcgcaggggctgggctgggcgcgcgcgggccgcggaggacccggagccacgtgcctctccttctcgcgcgtcctactggggatgggggtctggagtagccggcagaggctattgcgggaccccgggcgcgtgggtagagcggggtgccccactggccccccaggggcacgcagctattgttatttcccccctcccccgcaggatgaacttgcgtcctttctcttctccgccatggaattctgctccgtgcttttagccctcctgagccaaagaaaccccagacaacagatgcccatacgcagcgtatagcagtaactccccagctcggtttctgtgccgtagtttacagtatttaattttatataatatatattatttattatagcatttttgatacctcatattctgtttacacatcttgaaaggcgctcagtagttctcttactaaacaaccactactccagagaatggcaacgctgattaccagtactacagctgctaccgccgcttctggtcctttggtggactacctatggatgctcatcctgggcttcattattgcatttgtcttggcattctccgtgggagccaatgatgtagcaaattcttttggtacagctgtgggctcaggtgtagtgaccctgaagcaagcctgcatcctagctagcatctttgaaacagtgggctctgtcttactgggggccaaagtgagcgaaaccatccggaagggcttgattgacgtggagatgtacaactcgactcaagggctgctgatggccggctcagtcagtgctatgtttggtaagttctttttatgttttgtcctcttcgtggtgggtgagcaaatttgtatcatgggtggttccatttttgtgcataacctttccgattaacctttctgaatgtgccacttacataatggaattttgatatttacttaataaaactttactatgtttcaggttctgctgtgtggcaactcgtggcttcgtttttgaagctccctatttctggaacccattgtattgttggtgcaactattggtttctccctcgtggcaaaggggcaggagggtgtcaagtggtctgaactgataaaaattggtatgtttaattccaaacggcttcttaattttcgttttcgtcatatgttaccatggcattaggtatgggaggatgtgttctaacgtcgagggacagacccaagaattttgaactcttaaacatttaaagtggtttttggtttctgattttcattatttgatattttttcttaatgtgttctattccagtgatgtcttggttcgtgtccccactgctttctggaattatgtctggaattttattcttcctggttcgtgcattcatcctccataaggtaacctttctcccccgtatgaagacctttcatggagcacacccaatcgatttcaaacccagtggtacttttgcagatgtgattggtgtataggtatgcggccttggaaaattttaaaaagctctttgttctgtgcatttcttgtatgttgtggagttctctgaaagcgagtttttaatactcaagagggcagtcaggaaggaaaaattgaatactatgatgtgccaagaagtaggagaaactgggagcaaaaaaataaggaaatttattttgcgtggttttgtgtagctgtatacacattatttgtttaaaccactgttatattcaggctaatataatacgtaaacttggagttcaagacagtgtcccctgtggcttttttaactaagctgccagttaaatgggtctctgccgtgctgattatcataaccagtttataagcttctagatgaggactctgcctcccatagtgacttgactccaatttctcagaatagttgaaaagaaccagttaaaggtagtttttggcccgccccccaaaaaaacttcaggcagccatttaatttcctgtccatttgaaaatcccttttaagtgacccagtttgcatttcttttatcaagaagtcttgctggctgcaaaataaatgttgacaagggattatgttggcataggactgagttacagtgaggataaatgcatttttctcaggaaacaaagttgtcctttttctaaggtgaatggctcttaacaatccattgtaagttcttaaaagtgttcctaaactgtagaaatctgagggagatagcataaatcccagcaggtaagaatgtattcagacccacttgtctggtctagttgtaagcttctctagggaaagatttgtctcttctctgtagaaattctatgactagtaaagtgattcactaatcactgttttccatagccagaatctggcagaatatagcagtttaacactttgaaaacttgaaatatctttagcctggtataatatgagagtaaacagttcattgatatttatggactcctaagtttggtactgttttattcagcagacaggtacgataagcatctaccttcccactccctacaactgtagtgtatgatactgggatgcttaaattagaggctcaccagtagtcatggaccagatttttttgttttttttagagttttcattagaactgtatatcttgctacttagcagagagtcagaagcattagtaggatctcctgttgtgaattcctgcttggtaaaggtttatgctggccctgtgttgattattgagtagcagatcattttgtttttggagagggtttgtgtgtttcacctccacaaaacacttattccccggaaggggaatggtggtgctctgaggtgcaaagagggattctcaggtgcccagaacctctcatttgaggaatgcatacccccacggtgttattgagggctgaagttagatacggtaactgatttcttaattgtatatttcctatatgggtatgggaatgggcatgatcaaatgatgaagaatgattggcatagtgtttaaaacaatattgactttgaggatcttcccccactctgtgcacgtgcacacacacactcttgcaggccaatccctcagtaacaggagttttcagttgagtatgaatatttctgcttccttttaggagttaaatttcaagaaaatatccttagactggtaagcttttggtatcttaactgctaaaatctgaatatttgaccattaagatatattccaactcttaaatgtctatcttgaaaattaagattaacatgacctttttttttaatttcaaaaaattgcttttaaacattttctattctctgaatgtttgttccaagcatgttggggataggtgggaacagacagaatggaggtgaggtacttctatttaggactggcatcgcacagaaggaatatgcttcagtgctcctgttgagtatttttaaattctagtcaaagaaaatagggcttttggcattctcattagttagaaatatatttaggatgtcttcccttttctttagacaaaaccagaatatccaatatgtaaaagtgaactattctggtgaagatggggggttttgtgaagacctttcctgtcccacatgactagacgatgaggcattcacattatttccaggtgaagttttacttgtgtgttaggtggatctctacaatgatgagacctttcttgttttaccttcttcctagactctctggaacttttgatttttttttaaccatgaacctgtatttcacaataaactattggtatagtagtgtcattcataccctaccccatccccaacaactttgcgtagagaatacctcagatttgtttacctcagggaatacttaattgggctatgctatacaggataataaatacacaggctgctacttcagactagtcaattacaatttgatttatggataatcatattacgaaatatctttgaaaatctattgagaagtccccacataatgtctttaaaacccaggaaatttttgggggtgggagtcttgggttgggttttttggagccttttttttttttttttgagacggagtctcactctgttgcccaggctggaatgcagtggcacgatctgggcttactgcaacctccgcctctcgggctcaagcaattctcctgcctcagcctcctgagtagctgggattacaggcgccaccacacccggctagtatttttgtatttttggtagagacggggtttcaccacgttggtcaagctggtcttgaactcctgacctcaggtgctctgtccgtcttggcctcccaaagtgctgggattacaggcttgagccactgcacctggctttttttttttcttaagcgaagtctcgcctgtcacccaggctggagtacggtgacttaattgtagctcactgcagccttgacctcccaggctcaagtgatcctcctgcctcagcctccagagtagctgggactatgggtgtgtgccaccacatctggctaactttttatattttatagaggtggagtcttgctctgttgcttaagttggtcttgaacttctgggctcaagccatcccctgcctcatcctcccaaagtgctaggattacagacagacatgagccaccaccacacctgacctgcattttcttaagactagtctttagaataaaaatacacaccttagtttcctaatcttgttgactgccctcagagtttgaccaccgttgagttagttattcaaggatgcttaacagttcttgatttctgtatgctattgtttttgttttggctatttcactatctgttaacattctctattaaactatagataagagttaaattttagagtggttttcaatgagtgctcatctctgctaatttgaaatggtacctttactttacacatgggtctgagctttcccttgtttcactggtcttaagctactaactttccagtgtattgattattgttggaagctgtagggttttactttctgtttttcctccccaagattttccactggaattgtgatcaagataacattaaaccttttaggctaaggtctttataaagtttttagccttcccatatatgtattcagatctttgctcccaatttttttttttttctgagatggagtcttactctgttgcccaggctggagtgaggtggcccagtctccactgactgcaacctctgtctcccaggttcaagtgattctcctgagtcagcctccagagtagctgggactacagatgcttgccaccacatccgggctaatttttttggtatttttagtagagacagggtttcaccgtattacccaggatggtctcgatctcctgacctcatgattgtcctgcctcggcctcccaaagtgctgggattacaggtgtgagccaccgcgcccagcctcctcccattctttcggtgtttgacttgggtgttctcctatagaattaatacatactaggtatggtagaattcttatttttagtcactggccttactgttccttaaacatttcaagtttttgccttagggcctttgcatttgctgatatctctgtctggaacattcagcgcccaaataatcaggtggtttgccccttctgtacccatagttaatgtacacagcttgctagcttactacatttatgtcatgcttattccttgaccctccccacccaaatggtgcccccccttccatcactctcctcttacccttctttatttctcttcacagcatttgtcagtactttacattattccatactagaaggtgagtgtcagttctattagaacaggaacttggtcttattccctcctatatttcggtgcccagaatagcacttggcacacagtcttttgagtgagtggatgaccttgtgcacaatcagttattatcattgaacttcggtaaagcattaattgtggcatctttgtcagatgtttagataagatggttggcgtacgcatagtctgcatgttgtatttttagtctttgaagatatgaagtcaggtaagcaacatcctaacatagtctatttcttgacatctcttacaaacgtagagtatagcctatcctcaggtgtgtgctgaagtttatattagggcttttgggtaccttagaatgtgggtattgcaatctttattcaggatgttatcagtcactggtacagttagtcttgttattaaaagaaaaaagaaaaaaaaacaggtagaagttggaattagccttcgtaggaagaattccagatgcaaatgcaggaaaaactctgttgtccttggaaactactctggagagagttattggcactataattcccaaacctaccctgttaaaagattctgtggaaatgggttaacctttataccttttaagatattgatcttaatgatgttttacaggcagatccagttcctaatggtttgcgagctttgccagttttctatgcctgcacagttggaataaacctcttttccatcatgtatactggagcaccgtgtaagtacctatcaaaatatttaaatgtgaatttaaagttgtttacaaaacttgcattaaatgcccaatttacccctttttgctttacagggctgaaatctcctagaaggtggctggcctgcgcccatttcagaaggctgcaggctagtgtacgctgagttaacctagatagtttttcaaccaaagagacctgctcagattctaaatcactacagacctttcctctttagtcttcacaggatccactgataatatgatcatctccttccctttctcctgtctatgctaaaaatgctggaattaatactgacctcaactactgaagtcattagttatatctgatcttcagtaatcagtcatttaggactggtttgctggatattctcatttttctctcccaaatggagatactattgtttctaagtactaaacttccatgaatctgcttgaatgagaagagttgggatgtttaccacctgctctaagtgcacttggaagaagaaattcatgcagctaagaggaaaaataatttgtgagaatataaaggttgaaatgttgatgactttcatgtttgggactaaggcaaggcatggattaaattatggcgctacaagtttaatttagcaacaacaaaagattggtaacttgtaactggcaggacagtacagttttggtatctagactcatttggcctgatggtctgtgactacataggcagtgacttttattctttatactgtgacccactggatgaaatacaggacacacatgtatgtatgtagagagaaagataactggaatagtgtcatgaagccacttaatgcttactatgtgctatgcacccatattttcaaattctctctttttttttttcttaacatttgttgtggcccactgaaatgatttcagttttgagtaatgggttgtgacttgctcttaaacctcactgaagtagtaagttgctgacccaaagtagagttagctaaatatttttattatttatttatttttttgagacagttttgctcttgttgcccaggctggagtgcaatggcatgatcttggctcaccacaacctctacctcccgggttcaagcaattctcctgcttcagcctcccaagtaactgggattacaggcgtgcaccaccaagcccggctgattttgtatttttagtagagacggggtttctccatgttggtcaggctggtctccaactcctgacctcaggtggtccgcctgcctcagcctcccaaagtgctgggattacagacatgatcaccgcacctcgccaatattttaattttttaccttattttagattgagggattatatgtgtattttgttagatggagctaagtatttttaatcttgctaattaattcttggaataatcaggaacgaaacagacaactttaagaaaatattgttcttacttagactatactgaactgctatgtgccggtgaagagaagtttgtatgccagatttccattgtaaacagttctttgtgataaactaaaaagtctcccatgatgctcttaacactcattctttatgtggtagaagcaaagctcagagatgagtgaaattagaatcattttaaaaacagaaacttagatattttcgttgtgtcctttatggatcatttgtaagaaaaaccagtctctttcctttttgacttggaatgtagaccaacttaaattgtgatagacagtaatttcatgtatattttagtttgtgtgaccacatgatcaaaattgaaagcagaatttaaaatgaaaagatacatagtcaccatagaattgtagtttggggccgggcgcggtggctcatgcttgtaatcccagcactttgggaggccgaggtgggtggatcatgaggtcaggagttcaagaccagcctggccaagttggtgaaacctcatctctactaaaaactagaaaaactaaccaggtgcagtggcaggcgcctgtaatcccagctacttcggaggctgaggcaggagaatcacttgagcctggtaggcggaggttgcagtgagccaagatcgtgccactgtactccagcctgggcgacagagtgcgatgctgtctcaaaaaaaaaaaaaaaaagttcaaaaacaaaaaaagttttagttttgaagggacctcaatttgtttctaattttttttttttttttttttttgagacagagtctcgccctgtcactcaggttggagtgcagtggtgcgaacttgggtgactgcaaccactacctcccgggtttgagcgattctcctgcttcagcctcccgagtagctgggattacacatgtgcatcaccacgcccagctaatttttgtatttttagtagatacgtggtttcaccgtgttggtcagtctggtcttgaactcccaacctcaggtgatccacggacctcagcctcccaaagtgctgggattacaggcgtgagctgccgcgtctggccttgtgtctgatttttaaagattaatcattttggggtatgatagaatttccagtttataagtacaaacagtccctgacttcatggttcaaccttcagttatttgactttttgatgggtttataggtacataacctcattgtaagttgaggagcatctgtgatttcgtacataacaagcaaaataaagcaaaacaagcagaagtaactaagctattcctagatatcaactacagatcattataatatcttttatgggttttttttttttttttttaccttttttgtttttcagggatggggtcttgctgtgttgcccaggctggccttgtattcctgggctcagggtgttctcacacttcagtctcctgagtagctagagatcattataacatctgttagatttaaataggattgtatagtgctttacttcttttcgtttgtttttgtgacggagtttcgctcttgtcacccaggctggctggagtgcagtggcacgatcttggctcactgcaacctcgacctcctgggttcaagtgattctcctgcctcagcctcccaagtagctgggattatagaagcccaccaccacatccagctgatttttttaattttcagtggagacggggtttcaccatgttggccaggctggtcttgaactcgtgacctcaggtgctccacctgtctcagcctcccaaagtgctgggattacaggtgtgagccactgtgcctggccagtgctttacttctgtctttagtacaggctaatggtttggagcctactggcgtgcatatgacagtcagataatgactaatattactcattcttaaaccatgtgaacagtgttgctaggcaagtctttttttaaggtaagacttgtaagtgaaattaccactaaactttgtgtgtgagaaagacaaaactttttttttttttttttttttttgagacaaagtctgactttgtcacccaggctggagtgcagtggcgcaatctcagctcactgcaacctccgccctgccaggttcaagtgattctcccacctcagcctcccgagtagctgggactacaggcgcccaccaccatgcccggctaatttttttttgtatttttagtagagatggggttttgccatgttgggcaggctggtctcgaactcctgacctcaagtgatctgcctgccacggcctcccaaagtgctgggattacaggcatgagccaccgtgcctggctgaaagacaaagcttttacaactattcttaaattatcaacttttgatagataatatccttgttttctgtatcttgctttgatactgctttcaaggagataatctcattaaagcattttactaaaggccagtatagtgaatgtaatcacttttacacagaattgtgtcagcatgacaaatgtgactactgagacatcattctgttaacattaaaataagtttgtaggtggtaatggaatatgtggcagttaacgatcatgagctaggagagtggaacacttgctgtctttttcatagctagtcataggtccttagcgtgtagtgatctttattatcttccaaggtgaagaaaggaaaaggctcgtatgttgagaagcataggaacttgagtcccgcaggtgttcaagtgggctaggctggtgtgggttttcagatgatcattgagtttttctcccaaatttgtataggcactagcacagtaatcctgtgcacttaaatctggcagcagctgtcaggggtgatgggctggtatggggaacccctcagtccccagaggagggtttacacaatattgcagggggctgttgccctggggttttcaagatgcaccattttatctcctagtgctgggctttgacaaacttcctctgtggggtaccatcctcatctcggtgggatgtgcagttttctgtgcccttatcgtctggttctttgtatgtcccaggatgaagagaaaaattgaacgtaagtaataactaaacagcagaaaagtttaactactaatgttgtgtttattttttatttggccacctgtaaaaatctattagaagagattggcaaaataagagattttaaagggaaatttgaggatatgggtttgttgtccaaactgtttttagaaatggacttacatgacctaagacctgttcttaaaaatggacttacatgacctaagacctagtgataaagagtattcaacctatgctgtagagacaatctggggcattgaatttttttatgttccttgatcagttgccagtgacatgatagataaatagagaaatcatagcctacatttactgagaagtagaaggataccttaatgaaaaataaggggtagatacaagatattttcgtagaggaaatatttaccccaactgcttctgtgtataacttcagattcagacaagcaaagctaagtctaatgtgtacatgttgtatataggctagaatacatgtagacattgtattgcagtatacaatgcaaatacatatacaaacacacattgtgtgtctgctagaattgtagcacagattctagaagtaaacattttcaagtgtcaaggaatcatttaggccattaccacacactcatgtaattaaatactgagtaaattttggttagtatcggacttttttttccttaaaataatcattttctgcccttttcatcgatgtgaaggctgggttagcaatttgaagtttatcgtttcgaagctgagggatgcatagactgcagtggtgttaggaagaacgctgcgtcaccgcagctgaaccgaagagcctccgagaggttctgtgctagtctggctgtgccgagtgcacggtgggaaccaggctttcaggactctctggcctcattttccctctctgggaggagttgagacaagtcttgctttatgttagtcagtctgtagtttgactgaggtgcctggatggataggtcagcatactgagcactggcatgagagaggcagaagatactctggtctgcctgtgggatttacagccatgatgcacatctctttgttttatagaggtggaaattaaagttgtcgtctttagttccctgcattgagctgtgccactttgcttgaattgttggactgaaatttgagagaatcctcttttgaaaagaatagaattgggtacagttcagatttttagtttcagcttatcagccccatggttgagctactttcccctacagaatgagtcagcagggagctaagaagggttcttatatctgtaaagggttgtaaaaataaaaacaaaacaacaatgtgctacagaagcccgtaaaacctaaaatatttacagaaaaattttgggacccctgacatagggtgttctgcattgctggttgttcccaagtgagagttgctggcaaatgataaagcaggcaggaaaaatgttcctgaatgttaattgaagttcacatacattcttgttttgagatgagttttttgggggtggaggaaaggagacgtggaacaaagtagtatggccacaaccaaaccaaaaaagaccccccttttttttcctaggagaaataaagtgtagtccttctgaaagccccttaatggaaaaaaagaatagcttgaaagaagaccatgaagaaacaaagttgtctgttggtgatattgaaaacaagcatcctgtttctgaggtagggcctgccactgtgcccctccaggctgtggtggaggagagaacagtctcattcaaacttggagatttggaggaagctccagagagagagaggcttcccagcgtggacttgaaagaggaaaccagcatagatagcaccgtgaatggtgagttggaattcctggtttcacttttgttacctgcagtggtgaggaggcttattgttttggatttgatgctttttgtattgaatgtcaccttggtgatcttgactaggtgcagtgcagttgcctaatgggaaccttgtccagttcagtcaagccgtcagcaaccaaataaactccagtggccactaccagtatcacaccgtgcataaggattccggcctgtacaaagagctactccataaattacatcttgccaaggtgggagattgcatgggagactccggtgacaaacccttaaggcgcaataatagctatacttcctataccatggcaatatgtggcatgcctctggattcattccgtgccaaagaaggtgaacagaagggcgaagaaatggagaagctgacatggcctaatgcagactccaagaagcgaattcgaatggacagttacaccagttactgcaatgctgtgtctgaccttcactcagcatctgagatagacatgagtgtcaaggcagagatgggtctaggtgacagaaaaggaagtaatggctctctagaagaatggtatgaccaggataagcctgaagtctctctcctcttccagttcctgcagatccttacagcctgctttgggtcattcgcccatggtggcaatgacgtaaggtcagttgacattgatcttagtgttgctaaccctatttttaaaccatttatccttgtcacaggcctgtgcttgtggtagtggtactcctagcatttacaggaccccaaataatacaaataggatgaggtaatagcagttattgacataataagacagtacagttttattcttcagaggaattacaaagaatgtttatttttgtagatgataaatataaacagatacacttcacagagaaggcttttgtccatcaagatgagattcagttctttggtagtgaattgtgggatgtaagatgtaagatgaaaaacttaaaagtttttcatatagaatgattttgtagtttggtttgtaaactgtttattggaacctgagagttgctttaagctgcctataggaggaaagaggccaccatttgcctggcattccctccatcagagctgtgttcatttttctgttgtgtatgttggggttccatttatgtctttagaaagaaaggcccttttgccagatgagcttgaaagctgtactttagacaacctggtagatcattcagcagattgggtcttgccaagatctagttctgcctgaaaagtcacttctgccctctttgtttcttccagcaatgccattgggcctctggttgctttatatttggtttatgacacaggagatgtttcttcaaaagtggcaacaccaatatggcttctactctatggtggtgttggtatctgtgttggtctgtgggtttggggaagaagagttatccagaccatggggaaggatctgacaccgatcacaccctctaggtaagtaggtggagcaggttctacaaatgtcagtactcatttttttcagagatataacactgtcgagtgctaacacaaatctctaaagtaaccaagtttgtataagttcatgatgttcttattgtcattgttctttttagattttacttgtctggcccttaaacattttggtcagacattttacccatttagctctggtggtctctgaagaaaatgacttttctgagaaagctgtgtatgctaagagcggatagttatgtatacttgccttttatttgtcttgggagctaagactcaatgtttaccaaactcttcaaaataaaagtgcaaattttatttaatagtgggattccagaaaaacgtaaaactggaagcctttgaataaggaaactgggcatctgtggcctgatttaaataaagtagatcttaggggttatagcaaataaagatgtcagtggaggttttgtgactgagtagaacaaagcaggactgtgttaacttgaggtgtagtgttagcttctcaaaaaagtcaaactcacttcctgacaagaatccttttgtgtctgtagtggcttcagtattgaactggcatctgccctcactgtggtgattgcatcaaatattggccttcccatcagtacaacacattgtaaagtaagtgtaatgccaatgtgtgtctttcaaatggttcttctaatatgtagggtttttagttttacttctctgatactttgatttagaaagttttgtgcagttggagtcttgaagagttcataagttatttcttgtgtttattcttatttaagcaattaaatagatattctccccaaataatagaaacattgttttatatacagcttactgtagtttctggctactaacctcttcctttgttactttatcctccctcattgtagtctctttataataattttttttttaatctcaagagtcatttctacttggcaccattatgttttatttatttatgtatgagttggagtcttgctgtgtcacctgggctggagttcagtggcacaatctcggctcattgcaacctccgcctcctgggctcaagtgattcttgtgcttcagcctctcaagtagctgggattataggcacccgccaccatgcctggctaatttttgtatttttagtagacacaggatttcaccatgttggccaagctggtcatgaactcctaacctcaggtgatccacctggctcggcctcccaaagtgctaggattacatgcgtgagccaccgcgcccggccgacagcattatgttctttgcctttggggaagccattcagagcagggtaggtgtatgcttagaaactggcaggtgctttaattctggccaggtgggtttctgctgccatttgtggtggctgaaggcctggttctaacaagtctgtgaggcttgccaaaatgttggcaaagcagtttatttacagaaggcatatttcagggcctctcaggattgaaatactgagaaacaaaacaaatcttaaggttgtttgatgacaatctaataattataggagaaggaagaaactggtttccttaagagcatttaagctggtccatcatggatcctgctgagtcatctgtttgctacccggatgtgtctccagacaattgtttattaggtttaatatcagccactctgtaaataatcttaggaagacttacaatgcaatttgttattaaaagcagtgtataggccaggtgcagtggctcatgcctgtaatcccagcactttgggaggccaaggcaggtggatcacaaggtcaggagtttgagaccagcctggccaacatagtgaaaccccatctctactaaaaatacaaaaaattagctaggcgtggtggtgggtgcctgtaatcccagcacttgggaggctgaggcaggagaatcacatgaaaccaggaggtggaggttgcagtgagccaagattgcgccactgtactccagcctgggcgacagtgcgagactccgtctcaaaaaataaataaataaaagcagtatatattcattaaattttagcagtagctgagaaggggaaaagaaatagttcttgtgtccttttactaccgttagtatagattatgattggattttcaaattgccttcattttcccagcttaacctgttgtaaaccagctttcttggactttgtcttgtccaggggtctggggctccttgtccaaacagtctcaggtgtctgtttgccagaataccactggcacttcaataacctgtttccttggtctgcttctcttctaggtgggctctgttgtgtctgttggctggctccggtccaagaaggctgttgactggcgtctctttcgtaacatttttatggcctggtttgtcacagtccccatttctggagttatcagtgctgccatcatggcaatcttcagatatgtcatcctcagaatgtgaagctgtttgagattaaaatttgtgtcaatgtttgggaccatcttaggtattcctgctcccctgaagaatgattacagtgttaacagaagactgacaagagtctttttatttgggagccagaggagggaagtgttacttgtgctataactgcttttgtgctaaatatgaattgtctcaaaattagctgtgtaaaatagcccgggttccactggctcctgctgaggtcccctttccttctgggctgtgaattcctgtacatatttctctactttttgtatcaggcttcaattccattatgttttaatgttgtctctgaagatgacttgtgatttttttttcttttttttaaaccatgaagagccgtttgacagagcatgctctgcgttgttggtttcaccagcttctgccctcacatgcacagggatttaacaacaaaaatataactacaacttcccttgtagtctcttatataagtagagtccttggtactctgccctcctgtcagtagtggcaggatctattggcatattcgggagcttcttagagggatgaggttctttgaacacagtgaaaatttaaattagtaacttttttgcaagcagtttattgactgttattgctaagaagaagtaagaaagaaaaagcctgttggcaatcttggttatttctttaagatttctggcagtgtgggatggatgaatgaagtggaatgtgaactttgggcaagttaagtgggacagccttccatgttcatttgtctacctcttaactgaataaaaaagcctacagtttttagaaaatttgtt

SEQ ID NO: 113 - DNA, 4572 bp, Homo Sapiens
aacaatttacaacgtctttgtttctgctatgcagtgccctcctgctagagatggcaaaaatgtggggagggcttcagagcattctaagcctggtatttctggctggaatttttaaatctcactacaatcctgacaagagaccacgaccttaatctcccacggcatgactggttagtcttgatcgtaagccatataatcaacacccaaatgtgcataacacatctaaataatgtcaaaactacactatataccacgcaggggaccagaaatcaatctttacctcaaaaggataagcttccaggatgcaataacatccccttccacccttttctacaccctaaaacagtaatattcacggtaacagcaaagcggaaatcagcttttcctgaacatgtactgaattctagtcacattcacacacgttaattcatttaattccagccacaaggtaggcagcctctgttaacattttacaattgtgagaacgcagagatctgggactggctcaaggtgacacactgcagcaaggagtcagaatttgaatccgaagcagtgtccttccccctcgcaacagctgcggcgttacaaacacaggtcagccacggagaaattaatgacccacagccatccttgcagctctgcgccataactggggagacaagctggttcccgtgactcttcagtctgttttcacccaagtgcatgactgcgggagcaaagcgaccacgtgagcatcccccccccacccccccgcttcccccaggcgagggacagtgccaggccaaggacaagtcacaggtgcaacaacgtgccagaactggatccggagccccagggcgcaagatctcccgcagcgtcacccggcagagggacgggtgtggccaccgggcgcggcaggtcctgcgtgcgctgaaagtgcggctggaggcgcggacggctttccggagccccgagagaggagctaggaatgactttggtcgcagcctctgtaaccccgcatgacggcctctagggggacagcgaggtccccctcgatctctggctgtaatcagccggcggggccagacggtgccgagactccagggcgaggccgcagggagggggctgtcccgccccacgtggaccggctccccgctgggggcgtggccgccgaagcgggccgggccaatgagcgccaccgtcgggctcacccggctgggcacgccgggccgaggagggctgcgtcatgccgggggcggggcttcggggccggcgcgaggcgcggcggggtcacgcgggtcgctgcgcgggctataagtaggggccggcggggtgctccgctggagtgatggctgccggcgctctctgcgtggttcttcttctcggccgctgaaacccccgcggctgcttcctgggaaggtcgtgagtcccgctgagctgtccccggtgccgccgacccgggccgtgtgcccgtggctccagccgctgccgcctcgatctcctcgtctcccgctccgccctcccttttccctggatgaacttgcgtcctttctcttctccgccatggaattctgctccgtgcttttagccctcctgagccaaagaaaccccagacaacagatgcccatacgcagcgtatagcagtaactccccagctcggtttctgtgccgtagtttacagtatttaattttatataatatatattatttattatagcatttttgatacctcatattctgtttacacatcttgaaaggcgctcagtagttctcttactaaacaaccactactccagagaatggcaacgctgattaccagtactacagctgctaccgccgcttctggtcctttggtggactacctatggatgctcatcctgggcttcattattgcatttgtcttggcattctccgtgggagccaatgatgtagcaaattcttttggtacagctgtgggctcaggtgtagtgaccctgaagcaagcctgcatcctagctagcatctttgaaacagtgggctctgtcttactgggggccaaagtgagcgaaaccatccggaagggcttgattgacgtggagatgtacaactcgactcaagggctgctgatggccggctcagtcagtgctatgtttggttctgctgtgtggcaactcgtggcttcgtttttgaagctccctatttctggaacccattgtattgttggtgcaactattggtttctccctcgtggcaaaggggcaggagggtgtcaagtggtctgaactgataaaaattgtgatgtcttggttcgtgtccccactgctttctggaattatgtctggaattttattcttcctggttcgtgcattcatcctccataaggcagatccagttcctaatggtttgcgagctttgccagttttctatgcctgcacagttggaataaacctcttttccatcatgtatactggagcaccgttgctgggctttgacaaacttcctctgtggggtaccatcctcatctcggtgggatgtgcagttttctgtgcccttatcgtctggttctttgtatgtcccaggatgaagagaaaaattgaacgagaaataaagtgtagtccttctgaaagccccttaatggaaaaaaagaatagcttgaaagaagaccatgaagaaacaaagttgtctgttggtgatattgaaaacaagcatcctgtttctgaggtagggcctgccactgtgcccctccaggctgtggtggaggagagaacagtctcattcaaacttggagatttggaggaagctccagagagagagaggcttcccagcgtggacttgaaagaggaaaccagcatagatagcaccgtgaatggtgcagtgcagttgcctaatgggaaccttgtccagttcagtcaagccgtcagcaaccaaataaactccagtggccactaccagtatcacaccgtgcataaggattccggcctgtacaaagagctactccataaattacatcttgccaaggtgggagattgcatgggagactccggtgacaaacccttaaggcgcaataatagctatacttcctataccatggcaatatgtggcatgcctctggattcattccgtgccaaagaaggtgaacagaagggcgaagaaatggagaagctgacatggcctaatgcagactccaagaagcgaattcgaatggacagttacaccagttactgcaatgctgtgtctgaccttcactcagcatctgagatagacatgagtgtcaaggcagagatgggtctaggtgacagaaaaggaagtaatggctctctagaagaatggtatgaccaggataagcctgaagtctctctcctcttccagttcctgcagatccttacagcctgctttgggtcattcgcccatggtggcaatgacgtaagcaatgccattgggcctctggttgctttatatttggtttatgacacaggagatgtttcttcaaaagtggcaacaccaatatggcttctactctatggtggtgttggtatctgtgttggtctgtgggtttggggaagaagagttatccagaccatggggaaggatctgacaccgatcacaccctctagtggcttcagtattgaactggcatctgccctcactgtggtgattgcatcaaatattggccttcccatcagtacaacacattgtaaagtgggctctgttgtgtctgttggctggctccggtccaagaaggctgttgactggcgtctctttcgtaacatttttatggcctggtttgtcacagtccccatttctggagttatcagtgctgccatcatggcaatcttcagatatgtcatcctcagaatgtgaagctgtttgagattaaaatttgtgtcaatgtttgggaccatcttaggtattcctgctcccctgaagaatgattacagtgttaacagaagactgacaagagtctttttatttgggagccagaggagggaagtgttacttgtgctataactgcttttgtgctaaatatgaattgtctcaaaattagctgtgctgtgaattcctgtacatatttctctactttttgtatcaggcttcaattccattatgttttaatgttgtctctgaagatgacttgtgatttttttttcttttttttaaaccatgaagagccgtttgacagagcatgctctgcgttgttggtttcaccagcttctgccctcacatgcacagggatttaacaacaaaaatataactacaacttcccttgtagtctcttatataagtagagtccttggtactctgccctcctgtcagtagtggcaggatctattggcatattcgggagcttcttagagggatgaggttctttgaacacagtgaaaatttaaattagtaacttttttgcaagcagtttattgactgttattgctaagaagaagtaagaaagaaaaagcctgttggcaatcttggttatttctttaagatttctggcagtgtgggatggatgaatgaagtggaatgtgaactttgggcaagttaagtgggacagccttccatgttcatttgtctacctcttaactgaataaaaaagcctacagtttttagaaaatttgtt

SEQ ID NO: 114 - protein, 679 aa, Homo Sapiens
MATLITSTTAATAASGPLVDYLWMLILGFIIAFVLAFSVGANDVANSFGTAVGSGVVTLKQACILASIFETVGSVLLGAKVSETIRKGLIDVEMYNSTQGLLMAGSVSAMFGSAVWQLVASFLKLPISGTHCIVGATIGFSLVAKGQEGVKWSELIKIVMSWFVSPLLSGIMSGILFFLVRAFILHKADPVPNGLRALPVFYACTVGINLFSIMYTGAPLLGFDKLPLWGTILISVGCAVFCALIVWFFVCPRMKRKIEREIKCSPSESPLMEKKNSLKEDHEETKLSVGDIENKHPVSEVGPATVPLQAVVEERTVSFKLGDLEEAPERERLPSVDLKEETSIDSTVNGAVQLPNGNLVQFSQAVSNQINSSGHYQYHTVHKDSGLYKELLHKLHLAKVGDCMGDSGDKPLRRNNSYTSYTMAICGMPLDSFRAKEGEQKGEEMEKLTWPNADSKKRIRMDSYTSYCNAVSDLHSASEIDMSVKAEMGLGDRKGSNGSLEEWYDQDKPEVSLLFQFLQILTACFGSFAHGGNDVSNAIGPLVALYLVYDTGDVSSKVATPIWLLLYGGVGICVGLWVWGRRVIQTMGKDLTPITPSSGFSIELASALTVVIASNIGLPISTTHCKVGSVVSVGWLRSKKAVDWRLFRNIFMAWFVTVPISGVISAAIMAIFRYVILRM

SEQ ID NO: 115 - DNA, 699 bp, Homo Sapiens
atggatgagattagctacctgcagggcatggctacagctgtccatccacgcccccatcccctccgagaacacgcttcctcctgcagcccgcttcaggaccagcccacacaccacctcctccaggggcactggggttcctggaaggtgctggctcctcctcccaactccaggcaccctgacgccactttgtcagtgtggttttcacatcctgtcctagcgataataaaagaaggcgtgcaagaagatctatatgcagtgacgtgcaaaggtatcaagaacaagttgcgaaaccccatgaacactaaggactttgaacagatcatcccttttactcaatgttttcataaccttgaagtgaaggtggagggagcagtacgttttaaggtgccaggattacactacggggtcagtgctcccggatatgaactttctttttcagaccgaccttgggacctacagctttgcgagggacagtgccaggccaaggacaagtcacaggtgcaacaacgtgccagaactggatccggagccccagggcgcaagatctcccgcagcgtcacccggcagagggacgggtgtggccaccgggcgcggcaggtcctgcgtgcgctgaaagtgcggctggaggcgcggacggctttccggagccccgagagaggagctaggaatgactttggtcgcagcctctgtaaccccgca

SEQ ID NO: 116 - protein, 233 aa, Homo Sapiens [sequence omitted]

SEQ ID NO: 117 - DNA, 4624 bp, Homo Sapiens
aacaatttacaacgtctttgtttctgctatgcagtgccctcctgctagagatggcaaaaatgtggggagggcttcagagcattctaagcctggtatttctggctggaatttttaaatctcactacaatcctgacaagagaccacgaccttaatctcccacggcatgactggttagtcttgatcgtaagccatataatcaacacccaaatgtgcataacacatctaaataatgtcaaaactacactatataccacgcaggggaccagaaatcaatctttacctcaaaaggataagcttccaggatgcaataacatccccttccacccttttctacaccctaaaacagtaatattcacggtaacagcaaagcggaaatcagcttttcctgaacatgtactgaattctagtcacattcacacacgttaattcatttaattccagccacaaggtaggcagcctctgttaacattttacaattgtgagaacgcagagatctgggactggctcaaggtgacacactgcagcaaggagtcagaatttgaatccgaagcagtgtccttccccctcgcaacagctgcggcgttacaaacacaggtcagccacggagaaattaatgacccacagccatccttgcagctctgcgccataactggggagacaagctggttcccgtgactcttcagtctgttttcacccaagtgcatgactgcgggagcaaagcgaccacgtgagcatcccccccccacccccccgcttcccccaggcgagggacagtgccaggccaaggacaagtcacaggtgcaacaacgtgccagaactggatccggagccccagggcgcaagatctcccgcagcgtcacccggcagagggacgggtgtggccaccgggcgcggcaggtcctgcgtgcgctgaaagtgcggctggaggcgcggacggctttccggagccccgagagaggagctaggaatgactttggtcgcagcctctgtaaccccgcatgacggcctctagggggacagcgaggtccccctcgatctctggctgtaatcagccggcggggccagacggtgccgagactccagggcgaggccgcagggagggggctgtcccgccccacgtggaccggctccccgctgggggcgtggccgccgaagcgggccgggccaatgagcgccaccgtcgggctcacccggctgggcacgccgggccgaggagggctgcgtcatgccgggggcggggcttcggggccggcgcgaggcgcggcggggtcacgcgggtcgctgcgcgggctataagtaggggccggcggggtgctccgctggagtgatggctgccggcgctctctgcgtggttcttcttctcggccgctgaaacccccgcggctgcttcctgggaaggtcgtgagtcccgctgagctgtccccggtgccgccgacccgggccgtgtgcccgtggctccagccgctgccgcctcgatctcctcgtctcccgctccgccctcccttttccctggatgaacttgcgtcctttctcttctccgccatggaattctgctccgtgcttttagccctcctgagccaaagaaaccccagacaacagatgcccatacgcagcgtatagcagtaactccccagctcggtttctgtgccgtagtttacagtatttaattttatataatatatattatttattatagcatttttgatacctcatattctgtttacacatcttgaaaggcgctcagtagttctcttactaaacaaccactactccagagaatggcaacgctgattaccagtactacagctgctaccgccgcttctggtcctttggtggactacctatggatgctcatcctgggcttcattattgcatttgtcttggcattctccgtgggagccaatgatgtagcaaattcttttggtacagctgtgggctcaggtgtagtgaccctgaagcaagcctgcatcctagctagcatctttgaaacagtgggctctgtcttactgggggccaaagtgagcgaaaccatccggaagggcttgattgacgtggagatgtacaactcgactcaagggctgctgatggccggctcagtcagtgctatgtttggttctgctgtgtggcaactcgtggcttcgtttttgaagctccctatttctggaacccattgtattgttggtgcaactattggtttctccctcgtggcaaaggggcaggagggtgtcaagtggtctgaactgataaaaattgtgatgtcttggttcgtgtccccactgctttctggaattatgtctggaattttattcttcctggttcgtgcattcatcctccataaggcagatccagttcctaatggtttgcgagctttgccagttttctatgcctgcacagttggaataaacctcttttccatcatgtatactggagcaccgttgctgggctttgacaaacttcctctgtggggtaccatcctcatctcggtgggatgtgcagttttctgtgcccttatcgtctggttctttgtatgtcccaggatgaagagaaaaattgaacgagaaataaagtgtagtccttctgaaagccccttaatggaaaaaaagaatagcttgaaagaagaccatgaagaaacaaagttgtctgttggtgatattgaaaacaagcatcctgtttctgaggtagggcctgccactgtgcccctccaggctgtggtggaggagagaacagtctcattcaaacttggagatttggaggaagctccagagagagagaggcttcccagcgtggacttgaaagaggaaaccagcatagatagcaccgtgaatggtgcagtgcagttgcctaatgggaaccttgtccagttcagtcaagccgtcagcaaccaaataaactccagtggccactaccagtatcacaccgtgcataaggattccggcctgtacaaagagctactccataaattacatcttgccaaggtgggagattgcatgggagactccggtgacaaacccttaaggcgcaataatagctatacttcctataccatggcaatatgtggcatgcctctggattcattccgtgccaaagaaggtgaacagaagggcgaagaaatggagaagctgacatggcctaatgcagactccaagaagcgaattcgaatggacagttacaccagttactgcaatgctgtgtctgaccttcactcagcatctgagatagacatgagtgtcaaggcagagatgggtctaggtgacagaaaaggaagtaatggctctctagaagaatggtatgaccaggataagcctgaagtctctctcctcttccagttcctgcagatccttacagcctgctttgggtcattcgcccatggtggcaatgacgtaagcaatgccattgggcctctggttgctttatatttggtttatgacacaggagatgtttcttcaaaagtggcaacaccaatatggcttctactctatggtggtgttggtatctgtgttggtctgtgggtttggggaagaagagttatccagaccatggggaaggatctgacaccgatcacaccctctagtggcttcagtattgaactggcatctgccctcactgtggtgattgcatcaaatattggccttcccatcagtacaacacattgtaaagtgggctctgttgtgtctgttggctggctccggtccaagaaggctgttgactggcgtctctttcgtaacatttttatggcctggtttgtcacagtccccatttctggagttatcagtgctgccatcatggcaatcttcagatatgtcatcctcagaatgtgaagctgtttgagattaaaatttgtgtcaatgtttgggaccatcttaggtattcctgctcccctgaagaatgattacagtgttaacagaagactgacaagagtctttttatttgggagccagaggagggaagtgttacttgtgctataactgcttttgtgctaaatatgaattgtctcaaaattagctgtgtaaaatagcccgggttccactggctcctgctgaggtcccctttccttctgggctgtgaattcctgtacatatttctctactttttgtatcaggcttcaattccattatgttttaatgttgtctctgaagatgacttgtgatttttttttcttttttttaaaccatgaagagccgtttgacagagcatgctctgcgttgttggtttcaccagcttctgccctcacatgcacagggatttaacaacaaaaatataactacaacttcccttgtagtctcttatataagtagagtccttggtactctgccctcctgtcagtagtggcaggatctattggcatattcgggagcttcttagagggatgaggttctttgaacacagtgaaaatttaaattagtaacttttttgcaagcagtttattgactgttattgctaagaagaagtaagaaagaaaaagcctgttggcaatcttggttatttctttaagatttctggcagtgtgggatggatgaatgaagtggaatgtgaactttgggcaagttaagtgggacagccttccatgttcatttgtctacctcttaactgaataaaaaagcctacagtttttagaaaatttgtt

SEQ ID NO: 118 - protein, 679 aa, Homo Sapiens; identical to SEQ ID NO: 114

SEQ ID NO: 119 - DNA, 33581 bp, Mus Musculus
  misc_feature (3156)..(3175): n is a, c, g, or t
  misc_feature (18430)..(18449): n is a, c, g, or t
ccgagaggtggaagaggggggagcgcctcaaagaagcgatcagaataataaaaggaggccgggctctttgccttctggaacgcgcggctcttgaaagggcttttgaaaagtagtgttgttttccagtcgtgcatgctccaatccacggagtatattagagccgggacgcggcggccgcgggggcagcgacgacggcagcctcggcgggagcaccagcgctagcagcggcggcggcgtccggagtgcccgtggcgcgcggcgcagcgatgcggtccccacggacgcgcggccggcccgggcgccccctgagtcttctgctcgccctgctctgtgccctgcgagccaaggtaggagtctctctcccgctcttgctccccgcggtcctctcccttccctcgtggcgttctggacgggagcggctgtggctcccagtgcaagttccggagcccttgagtacaaggctccctgaccctgacttttcacccgagaggcagcacccggtgagggaacgctggttccccagaggggagcccctggcctcgaaagataaactcctccaggctgggcaaaatgcgatcattacgttctcacggtccttcggggcacttgtcttagttttcccgcacttgtgttttttatgcccccaaaccaggttgagccctaaacctagtttttgcaaaattattttcacttgccaccgaggatctttggcagcctggggtgtgtgtattgggggtggggggtgtcaaggagtctccacctccaccttcagagaaaactttctcatgcgttgaccttccttcctcgctggcaggtgtgcggggcctcgggtcagtttgagctggagatcctgtccatgcagaacgtgaatggagagctacagaatgggaactgttgtggtggagtccggaaccctggcgaccgcaagtgcacccgcgacgagtgtgatacgtacttcaaagtgtgcctcaaggagtatcagtcccgcgtcactgccgggggaccctgcagcttcggctcagggtctacgcctgtcatcgggggtaacaccttcaatctcaaggccagccgtggcaacgaccgtaatcgcatcgtactgcctttcagtttcgcctggccggtgagtgagcgacacaccgacagagtcgaacgcggggccgagccctatattgccttgagaaggatttaatgccacttgaaacttggcactaagttgagaggctttgggggtggcaagtttgagagtccagactacagctggacctggacaagatgagacgggcgggtcttccattctgggtggtgtctgcttagcgcagcgaaatggggtctctgaagagcattgctgggggaaagtacgcaaggatgctaattttatgcttgctacttccagttcccaccctcgaccaggcggtcattatagatgatttctttgcttaactaattaaaactcgtagtgccctggaaggcgactgcgcatagtctgccctgcatacgctgtccaagttggcaccctcccctttcccgtgagccgccccgagggcgggtgtgtccttcctgcagggtgtgggggagcaggcttcccgcggctctagtggggagattttagtgtgttggaggggtgctctcccagcctgaagtggcggctgcaggaggggggttgtctccggctggcgtccaagctttagtctgggaacctccgccccctgccggccccttcctcccgcccccgctcggtgcagcccaggctgccttactcccagcggttccccagttctggaacagctgtgtttgcaaacttccccgggaagggcgggcgcactctctcgtccggagggcacccggcctccgcaagcccttcccgcgccctagtaaggcttagaagaggcagcccgctataagtcgtgtttgcgggtgcaactgcgtgcgccctcatctcccccttttccctcggagctgcttgaggccggcgtaccgctggcagactgcggcagaacccttgcaacatcccaaaatgggtggaaggaagatgggtgcgattgcagaaggggaggaaagggaaatggtggggggtgtgcccgttgtccaggaggcgtgactcgctgccaggactggtgctccgccaagcttgagctccgagggtgggtggtaagagggggagatctgtgccccagaggattgctttccgccacgtgctcggatggggtgcgctctgctgcctcctacccgcggctttgggctgtgatttgaaactctgaagaggggcgggagagaagcctgtctggctgtctgtgtgtgaagctgagctggctcttaatgtctgcgtttacaggagttggcctttgctgtgggtgcgataagacagttatcgaaaacatgctattaaaaagggtcttattttggcaggggactgccgctgtaggtgaaatctcttcagatctgaaggctgtgtccgctgtgggatttcacttttacaaagaatgtttgtcttgtttgttaatcccctattagggagaactttaagctaaagaggttggccacctctaaatctggctgggtccattcgagcttagggtgagtactggctgcccttgagctgtgtttggagttttcgggaggaaggggcttgcaggtggttccaccctccctaggatcagtccgagcccctcgcttttcacaagaccataaaaggaatcttattagtgatgtggaaagaacggcaggcctggctgaggtttattttggagagaggggtcagggggaggatggcttggatgaaagcagacagacttgctccacaggctggctgggggaaagtgacccagaagtgtggctgtctgcttttgacacctggaagagagagtttctcaccgacaaggagcagaaatggtgtgagtggatggatggagggttgccaccactgctgggctcctactgttcagtgccttcaggccccacgggtcaccgaccatgaaatagactcgggttttctagaaagagggagccccactgggtcagcaccgagaatgtggttcttttttgaagctgggccaagtacatggatcactcctaaacaagtctccacactgctgcccccaaacaggcctcctgcgaaacacaggctttacttccgaagagaaactcaagttggggggnnnnnnnnnnnnnnnnnnnntgtgtgtgtgtgtgtgtgtgtgtgtgtgtgtgtgtgtgtgtgtgtgtgtgtgtgtgtgtgtgtgtgtgtgtgtgtgtgtataaactcaagtggggtgtgtatgtgtgtgtgttgttttagtttattttcctcagtgtggttagagaaccgctgctgtctggaacttccaagaatggctccagggtgagtcttagcttcaatgaaagccttaagcttcacaagtgttagtaatgggtcgcacagcttcattcgctttgataattaacacgagaggcttgtttttaaaacgggctgggggtgtagctcatcaaaataggtatttgcctaccattcttaaaggtcctgggtttgaattcaagccccacaaacttaatttttatttctcctccttcttagttagtttacagtggaattggtgtggagatgttggaatttcagagtaggccataatttaaaaggcaaacaaagcctccagcctaccttggcctcatagccacataagctgccaacccctaagcaggcacagttgtcttttgggctaagtactcctaaattggcttacggagaaaggaaacactgtgtttggtaaagctagttcagtgaagaaagtcatgtaattcctttcttttgattgctagtatggcccctgttcgtggcctatagaggaagaggaggaaatgatctggtaggattgaaacacagtctacatcccagcttgtgagacgctctgcagtggacgtccctgccatctcagtatcgcattcgcttatattgcccttgggctacatcctactccagtatcagttgctctggccccagtcttttagctttgtgcttctgattgggttgtcatccatgctgtgagggagctcaacttgcagcagctagcttgatttattattttccaatttggatactaggtgataagagcatagttatgacaggtaattgggcttaacaagaaatgatttgggaataaccattaataaatcaccgaaatggttaatttgcacctccccaaactagctcaaaatcccagtagtgcctgctcattaaaaatgcattagtataattacttctgtttttgaaaacctcagtcatatggctgcattggtggccctaaatttgtaatgacttggggtaaagcaacaggggtgtctggctttatctttaaataccactgaccctattcagagtcttgctgagagcaactttaattattttaggaaaagccaatgaaacgtgaccaatgtagcagaagaggatgccagcttgaacccgtgtcacacttatagcctcagtaactaaataacaggagttagagtcaagttgccatcaggtagttaatcacagaatctaaattgccagtccttgggtatgattatgctgtctgctgtctttcctctagatgtgtgtggacacatggaagagagaggaataagactctctttaagttagctttttttctgtacctcacctgtgtgccgagcatgtatgcagacagtgcgcttgtgtaagtgctaagcacaagggatgatgtgtgtatggagagaacattgtttcttcttcttgttgttgttctaagaaacctgcctcaaatgtttaagttgctttactgggcttttggggaacacggaggtagagtggctttcaagcactgtaaaacagctgtgacctggagtactttcttggttcctaatagttttccttttcctgcaggtatagacctctctgtgttttcttcctccttttcttgtttcttagcaacttgctcaaacctccagtacgtaaaagaatctgcaacccatcaactccacacccatagctgtgtagggccttggaacatttgtagagaatagtgaaggctcagtgctgttggtagctgaattgggcagaggcagaggcagcagcaatgtggtaggggtaaacctcctagagagccagcaatctgaatgctgcctaaggtctttacaagctctggtaccttcagggacactttgtacagagggcaggtgggaaatttaccatggagggaaaaggcgctttgtgagaaaacaaggctaaggctacaaggagtcctcacttcacatgggagccagattcggagtagccatgttgtggaaaggcctaacttggttccagagtgtcaggctttctattcacatagattatttctgcgtggacgcatagtctgtggttgtgcacactgccagcttggtaatccatagtgacaaatattcctgagaattcttcttggtggagctttagagacatacccctaactagcccaaggttttaggattcaaactgttcccaagtgacatttggctccagcccttaaatctactttaacaataatgagaacaaaataaacttttcttccaagggctggaagatgtatctggaggcatgaaagtgaggactctgacaggatggggagggaggtgagtcttgggctcagaaaactggtgttgctaggttactgcttggcccacagcagccccttggtccttactcatagtgtcagtaacatctctctctggagcagcatgtggactgggaagacattcccagggtggctcctagtggttaaagggggcatgtaaataatcaaactgagccctctaccagctcagcctagtttttatgcacttttggtaaatcagtagaaaggcttcttgtttgggcttgctctgtgtgaactggacggttgtgcttggctggctccctggtattctatctattaacctcaccacccttttgtaactggtgcatttaattatcagtgggatgcctttcaaacaggtaagggtaatgatgggaaaggggttaggggcctctcattgagagcctgcaatctgggtatgagctctggggccccttggtgagtctttgaggtgggctttgatgagaaaatcactctttgtggccagatcacactctattgacatgtcaaatcctgcaaaaatggtcgctttctgtggctggagcctcagcttgcatgcacgaggggagtggtctttttttccacccctcaccttgccaaaaccctaaaagacaggaattgtgtgtgcccacacatggactctctgaactcgttttttgtttcccatgttttgtgactggaatattttatactctggccacccagactcaggcaggacaatagagttggctggactgactgaagtgcggattacagagaagaatggggcctctccagaaatactgctaatacaggacaagtgacaggaagcaacagttgagtcagcagagcgcatgcagggcccctgacagacctggggccagcaggctgtgtacaatggctgtgttggcactcgggacattctcaggatgtgcatgcctctggcgggcctgcctgtcgcagcggtctggggttttggactccccacgcgtgccatttggatggcggtttgtttgtgtcggtcagcttggcaggaggggaggcagccgcttcttagggcttggtttggctaccactgttgccaggaaaaggaagctcccagctgccaacacaatcacctttgtttcttacatccccccctgtttaatgtggcaattaagtgcttactgctttgcccagtgccaaggtaacctccatagagtggagcaggacaaagaatgaaccctagaccagcagctcaagtgtggagaataggaggaggaggaggtgcctggtggcccagccttggtaaggtgaccctgtgaccgtggtatacctggagggctttgatgccaaggtaaaattgtatggaaatctcccaaaagtccgttctgaaagctgaccagtacttttgacgcttcacaagcatggaagccagccaccttactgccagatgtccttgagcctcaagctgggaaggggcagaagtgactcacttgcaaatccagatggatgatctggtaactatcgtgtgtctcttgttttgcctctcagacaactactctgggaagactcaggacaaaatatgaaatctgagtaattcatcaaaaatttcttttattgtttgaactacagcaaaactcaggatttgcttgttgtttgcttttttgggtgtaaagttaagatcaaggaaaacttgccttttgaagccccttacaaactcccataggactggggacttggcctctgctgaggatgggttttgtagcatccaatcccatgtgggtgatttgtggctgggtggcatgaggtccacatggtctaaaatctcagtgtccggacatatagctggggatgtacagaggtcaagcgtgggcctgggaaaaattaaagctccctagcaactaataatcattgccaaattatcttgattgttgatctatagtgtggggatggagtgggagggaagaatgcctcttaatagaagccttggagggaatcctttctctaaaggcagggcacccatgccccaggaaacctggaactccaatgcatgctttcaagagaaagcaaagtccaggcttggctagtctctctccacgcccttacccttattctagcccaccttcaacccccaaaaggaaggcacttgattaggggaaaatactgccagcccatggggctgtgggacatttcttttccatccagctggggtagtgttggtcagcaacttttgagtccaagacgaacctggcagatggcttgatcttacaagttcttgtgcaaggtctaaggatgccttctgccttgagaatgaagctgagttaatactgctgtgccagctggttccaaggcaccttcctttgcagtggtgtttgtgggtatgatgtgtgtttagtgcttgtgcaagtctgtcaaaactcttggtatcaatgcatttagtcagaggattaattacagcgatattgttgaagtgaaggatgtgggcctcaacgtgaccaacaaatgaagggcttaattatacagaatcagccacacatctggcctcatttcgacttggctctcactgtgaaccagtagagaaatataatttcttactgctcttcgggaagagtcctataatttgtaggaagtcctagggaacttaaagaggctgtaaataaggtgtaactttcactaataaaatattaacgacaataacaatgtattcggacctacaaccactaacaggagagcgtgaggtatgtgtcctggcttgcccggttttgcttgctttgtgagcattttcccacagttatcagtgaacgaaatggaatcctgctgtaagtatgaagcatatttaggctgaattccaaagcaggggcctatcacaagatatttttgtcgtcagagcagacctgctgtgtcaccgagagaggagtgagcttccttgatttatgaatgaaacctcctgcttttctctcatgcctttcccctatcggtgccatctcttcccctggcagcagtgttttctggtggcattgtggttatctgagcaacagaagcattgtggcaggcagagcagcgctgcacaaacctgttgcagtcctgtttctccgctgtatttctccagcacccagataggcttagcaagattcacctcaatgcctgttgtaagtgaaggttggagtaaaagtggaaatttgctaatggtttgggtcttggggtgaagcggagatggggttcagagacatgcttagaagattaaaaaaaaaaaacaggtttcagtaggataactggcatcttgccagcctccagggaattgtttagttactgaactgattattccaggaatgttagatcttattgacagatacattcatcaataaacataacccatgggtgtgcggtgcccgtctcctttgtgctttctcccacagacagccacaacccaccccaccatggaagctaggttgctgcctttgtcttaagtctttgagccttacccctccttttttcctagagtcacctgatacttgtgggagctgggatggtctcacacagacagggctttcaaaggggttctgaaaaggaaaagggggcctccctggggactgctccaccagggcccaaagcgtaaccttagcagttctctctcaggacaaatacctgagtaggttggcttgggataaattctttgtgtgggtttttttctcatgcactaagactagggactgaaaagttttgggaaacctatatgctacgtgttcccatataggcaggtactactttctgatcagggtttggagcagcttggcttgctgggtgtgagccccagtgttcccctgccaggtgaaaggagttatttgtcaacctgtgaagagcgctgcagcgagaagaggttggtcaggcttcaaataccctgttgccttttttctgccttctattttgggttggttcctggtaccagagcaccagagactgcaggcagcatcagcatcgtagagttgacccctgtatgtgaatcactaaactttgcttatctgtcttgcagaggtcctacactttgctggtggaggcctgggattccagtaatgacactattcgtaagtatctcatcaggaattcttctttaaatgctggtgcgtttaaagtgctgtgcttggaagcacagaggaaagcctccagtgccccacccccaccacaggctgaacctatccggggactctattccttaacttctagaactttcaactgaaatattaagtagccagaatagactcccagtttattcagtccttgcagaaagggacatagtttatctctggatagagatcttaatggttttacaactttaaaaccttgtagactgccaaaggatcaaagtagtgactttttaaaagtccatttaaactttaagtgagcatttaatctctcatcagaaagataaagctgtaaagggtggtgctgggctctaaagaccaaccttaaatttcactcagtgggcaggtgagccccacgtcagcctgagtttcccacactgctcaccacaaacctcccattgaagccgaatttcagagccccccgcagtcaggacctgccctgtccgttttgaaagatggctctgttctctgggcaggttgcttttcaggcctgcagagaagtggctggggcttgtggggtgtgtggagaggtagtgaaggtgtactctgctgatggtggtcaactctattgtaacacgttcgttctccctcccagtgagatacacagttcctcctttatcaccagagcctggttgcctttggaaaacctgattcactcggacagttttgatctgttcaggaaagagagttgatccatttttttgcctttgcccactgctctcagagtgcctcacaccttctacttctctcacttattcaccctttcttattttttttttttctcaacatcactgtgctttcccaccataggtgaaggtactgagtgtccagcatgggcctagtcacagctgctcataaactcaatggcagctcaacatggccgactccttgggcctcttagggtcacacaatccttggcaagccctggtgtgcagcaggctgcctgtcactgggattactttcttgctttggtattcagctatttagacagcagccctgcctaggagggagtttgtggaaggccaggatctgcgctgtctcattgtgatagacatttatatgttgaggttagtggtaggacacattgccaggcttggttgatgccagccaaggtcatagatacctgttagtcctccccacaaaacactgagctctgcatggacatcctatcattgtacccttaatgtacaaaacgctgggtaggggacagaagtgggccttctgagtgcactggtgccagaactaaagctgggagaggattcctgcccagcatctgtagaatctctgctaagctatctgtcctctcactttccagggctatgcctccagggacctgaggcctgcccacagttccccatacttatccacatttccaggcaatggaaatctctacattttgggactcctggatatctcatttcttcctagggtaactagtctctggataggagacaaagaagactgagatgagaacagtttgctttcagatctttcagattttagaaagtgagacacagtcccagatgcccatcacagttatagaaacttacagtatgagccttgggctttgtggtttatctgtttttctgttgactctcattatttttcatctgtattttccaaggtaccacaaattgccgagtcaaagccaaattggaggtccaagagcactcccctttaatggagccctttctgggtgacaagcaccagtattgggacagctagtgccataagccattcatttggaaggcccctatgtactttatgtagcatctgtacctatacagcctccaacttctgaatagtcttgatcttttgctctccatatgaacccagctgcgtcctgccatgtctactgctgccctgatccacttcactgcctgcttataccttcagagttagtgttactgctacatggcctgtccttactggctctccctggtcaactttcaatatcttctccattcttgggccatcttattttttttttccttgagcataacatttgatggtcaccctggtggtagaagctaacagctcacgggctttctatagctcttggtcagatctttgtatgccttttcttcctgatggcttgtcttaacacaccgtgtctactgtgtctgtttcctagccattcttgattcacttgtatcctggagtgtatcacattactttcttgtctcaggacctttgtgcgcactgtttgtatgtttggctccctgttttctttaccctctgcccttacaaagcatctgaggatgtcaaggaggagcccggtagtgtgggctgttctttggttgcaaagttcatcaagttgcaaacatcctggctttgcttgtatcttataggcagatccccaagtttgggtcagaattccttttcacatcagctctgtaattatccccaaggaaggttttgctcgccattctttggtctgtgtctatttgcaaaaactcaagtataagtctagaccggattaagctcaggtgcttctgaagttccaaggctggctcccagcctcagtcttccagttgttcctaatatggctcaggagtataacatctttatagatctctttttccacctgagcaaatgattttagtatattgtaacatttaactgattgatgggcaagcatacccaggagtcctggagaccaaggtttccatacagcagagacttctctcagctaaggtcattatctaggttttctgattggtccttgagttgtgttcctggtggtccctcctcctttcttctgggtgtacaaagctctgtgtatgcttcatgatgcatctttacaccagtgacattaacagggaagtgtgctaatactcttttccagccctaaggctggagctaccccaggtgagctgccccctgtccttagtggtttaagccaatgggagagctgagtcaggtggtagtatcgaatcatcacacagtaaactcgggctctgtaacccagacagtgtagagcatgctacatatttcgtagcctcatggctccgtggttgtaaagttatttccatagctttgttagccacctacccttctgtggattctgaagttaccttcacagaatttcctgaaagttaggtagaaagtgcaccaaactatacagagtcctttgttaaggcacatggctactgtgtttaataattccttcattaagctcttagagcaacaccggaatagcccactacatttctcaacggaaccagcaaagcaaacaggcagttagtggagaggcatttttgccattctctagtctgtgtgtatttgcaaaaacttgagtacagtgtgacatgcatgcacgtggttctacatgttactgaatgtaagctacagatacgtgggctttcaaggattgccctacccacaccatggtccagactggctggggctgtgttggttgtgcatagagccacccaggagttgttctcctggtcacctgtagggcttgtctagctttgtcaaagagcacaggctcaaggcctagaaaaacagtggtgtgggtgtacaggaatcacaaagacattgaaagtaggtcctaagttgcctctccaaggtggccttgaatttgacaaggtgatgactagcaggtttaagaaaacaaacacagcaccaggttgagtgctgacttagagccttgtctgttcacatcctcctgtacttcttgcttctgggctttaaagctattttagtacctgtctcttagactagcttgtaggtgacctcaggagaggggccagtcatactgcttctgggaactgttgggctctagacatttgctttgcctctcaggcatctttaaggtacctgacttaaaacagacacaaacaaaccgaatgccttgacctacctgtctgcaggctgagatgaatttagtcatatgatgagaagagtgaactgaattatgtttttgctgttgctgatggaatgccagcttaaaagagtttattagtggtttgtttttcacatattacaattcaccccttggccctcagtgaggaattttgaaatggaactttttctaagcaagacttgcaagtaaaatgtaaaaaagaaaaaaccaaaacaaaacaaaacactaaccttgtctggaatagtaaaatttctttcagagcaaaatctcctaaggcgcagctttctataacatttaggagtttttgaacatttgctatggacagcaatatgttagaaaagttggcaaaggatacggatcacaggaacaaataaaaatactgtcactaaaggtcagttaaaacaggagatactattgtatctgttggacctgttgtgcagagatgagaaactgagctgtgatactgttgctgaggtagcaccttatgctgagggtctgcaggttttgctggcaggtatctgtgcatcacctggggatggaatgtgttgtttgtgtccactgaatctgttagggtatttcttgctgctggccaacatgcattcaacatgcttattgtagctttgaataacaagaggctaacttaaaaaaaatatatatatatatatatattttaaagactttcttttttatgtatgtgagtacactgttggtgtcttcagacacaccagaagagggcatctgatcccattacagatggttgtaagctaccatgtggtcgctaggaattgaactcaggacagtgctcttaaccactgagccatctatctctccatccctgcaagagactaactctaatgtcttgaatgcctacagatcaaggaagaggtgcatttattcaatgttgtttccaggcacctgacaactagtttgaatggtaaattggcatacaaaaacgagggtacagctcttgttactatttttttttaataacagtttgatttttgtactgtgtgtgtttctagtccgaaagtaggcaaaatggtcaaatcggaagatgcttatgtgactgttaatgagtttcatcttcttctccccctctagaacctgatagcataattgaaaaggcttctcactcaggcatgataaaccctagccggcaatggcagacactgaaacaaaacacagggattgcccacttcgagtatcagatccgagtgacctgtgatgaccactactatggctttggctgcaataagttctgtcgtcccagagatgacttctttggacattatgcctgtgaccagaacggcaacaaaacttgcatggaaggctggatgggtcctgattgcaacaaaggtatccaagcatgcaactggatgcataaaactgcaaatgatgttggcttatcagtttgggtaccaggttctcacccttatagcagtcgggtggcagggtgggatgctgccgctatcattatcttagactgaagcatgtagatgctgtatgtagaagattctgttagtgccctgtctggagtccccgttaccagctggtgtccccatcccccagctgctgtgagtgttggctgctaagagctcgcagctgctccttctccagggagttgtccttggccaggcaggagccactctctgccccatccctgcagcgaacagttactgagtggctgacacggggggatggggatgttgggaaggccagcctctttgctttaacactgtggagtaagattcacactctggaggttcccctgggatcacactgaagtcagaccccagctgagaccacatccttgctcagctcctccttaggcctcatctggctccccattccttcctcctattaccaaatctcctcctcagactgcttctgagaagagcctgatgccaaacaggaccaggccaagccagtggtgtttgaacagacagtgctatgggcaatgactgtcactgagctcacatgtcactgcagcacgtttcactgggcatctttgaggttgcggcattaaaggaggcgggggaagtaggtggtaaccttgggagtcccttactgtcttttgccccttatactagaattaaataattctaattcctagcaatagagttggaggtcacagcacaacagatgctatgccctcacggacatataatataccttggtggtcttggaaaatcattagataaactccttcttttagctttaaattgtgtggaatgatgcaggagaggatatttggtctctgaggaagtagtcctgtctcctggtatctggcgacagtagtttgcttaaactggaattgatgacagaaggaattgctcaatattttaaaattcagtagcaattactgaggttctgtgttcttttttaagtgtccacttgatttctttctttctgtgagcaagtatagaacagcttgtaagcttacttgtctgcaagatcagcttgcctggttttttagctccatgggattgttgaaaccaggcatttagtgggaggctcacctgaaaataccatgctaggaccatgttggggcagggaaggcaaatgaatgaatgaatatcttcatttttcctcttgatgaggggggaactaggccctgacagggctcaaggaataagcatgttgaggaaccccctaatcatttgtccccaaacaatgttgtgacttgaggttctactaacatggccttggagtttgaacctggatttattgggcccccaattctatgtactagaccatttacataactgtggcccgaaaggcatagacagcgctaatgtaactttccgattttttttccagctatctgccgacagggctgcagtcccaagcatgggtcttgtaaacttccaggtgactgcaggtaaatgaccaactaattgaactctagtaatcaatcactttctcccctccccaccccacccctgccctttctctccctttctctttgatgcaagacagaaaaactgacttccttatgaatgtgcctcgttattttctttggaggatgaaaaaattaggggaaaacacaaaacaaaacaagcacatgagaagcataatgaatcataccagctgtttggtggaatgcacccttcttcattggtgctggcgggtgggtttagtcaaaaccccaaaccaaaatccttaatgggcatagctggcatctttgtgtattaactgttctgtaaattggtaagacctatttgtaatcttccttaagtgctaatgtactggactgggacgaagctttgtttcccctgtctcctcctccaccctggcttttcctctggcaccctcccccacttttcccatcaataggcaaaagtccagcattctttagaatgggattagtacaatctcctggcccctttgcagtgggagctgcgctgttgctggaggttaatggctgtgctggaatctgctcggtggagcctgatgaatgtagactttgctgctggcctttgaagtctgctctttatggtccagggacaatactgaaaccaaacggaaacctacccagcctgtttccccttccgatgccggttttgggggctttttgaaatgtacattatgccaatttggaaaaagacttgtttcaggaaatacctttggggtctgtggcatttttgactggtctcaggctttattctccctgaagcctttcagaattagcaaatttgatgagacactaagtggaccctcttcaagtcctgtcacctttgctctgaaaggctgcactgacttgagccaaagacagttttgaaacagtctaaaggcacaaacccatagaaggaggtgcctggtgcccttactaaaacaaaacaaaacaaaaaaacagtttttggtcaccaaactgtagaatttacagagaattgttagaagtgcaggttcccagttcccacaactggcacagatttcccaggccttggttgggcctaggagtctgtatttgacaactttgctcagtgatttatccctcagcaaacacgcgggctactgctttaaccagccacccataggtttaaccttgatgactcttagccccaccctgagttctcttccccaaccatgggagtgcaaacttgatgcttaagagatccaaggcagcgggagtaaactaagaacaggttgtcctggaattgtttcttcctgcttttgaaagttgatttccaggaagcctgaataggatttgcccactaaggaacgggcctggtcacagctgacccggcatccaacagcatctttgtcagaggtggagcagaaacctaccttcaatgactctgctaattaaggctgttctggagaaagtaagagcgctagttattctccagcctctgagcctgctccctgctccgatagcatcagcgagatgtgtgctactgtcatcagaataaacaccctgctgggcaggggagggccctcctagccagaacaacaggctttgtttccagaattgagccctttctctttcgaagtctcacctcccactccctgcccagacatgcaccagtgctcttatttacttaaggtgcaactttcccacacgccatttgcatagtctcccagcccagttccttctctctgccttgaaagaaaatcaaaacagaaccttccagctaaggaagttcaggttgagtcctgctcccgaaatagttgcattacaagttacctgtaagttgtcttttgggttatgtattacatgagctttgttgttgttgttgttgttgttgttgactcacccacaggagaaaacttcactgattttgttggtctcaggtggacttgggttgtcccttactgggtgtacagactggtttcgnnnnnnnnnnnnnnnnnnnnctggtttcgtgccagcctgacaataatatcaaacttaattatgaatcatcatctccagaacgtcagcttctcatggggctgctaatcatctatcattaccccgggataacgtggtagatgcctctgttagggtcaggatttttatttgttcttgtttgaagtcatccatggcctcctatggttgcttttttaggcttgggcattgagccttcattaattaggaggttggttgggtcctcagccgtccggcttggttttattaggcaaactgaagacgtgtagtgacgcttcacttgggacaacgcgggaggacagaggattgtggtcccatcagttacctcatgtcttctaagctaagaatattgatctgacagaatggcttcccaccctcctacctcccactgacttgggtgtctgcctctgaagagaatggttcccatctagtggcatactctgtccttagatcagtcttttcaatagtcatttgtcatttaaactgatggtctagtttagagatgccagactcctgtgtctgattaacttttaagccccacattctagtggttgtctgtcggtgtttgggtgtagatagaggttaggaagtagtcaggattctcaagggttcagtggcttctcagcctgggtgattagctaatagctagatttctataattttcccatgaccaggatttgctcctttgcctccagctctctggaactgaaagcaaagttcctcccctccccctccgcccccgccccccgctccccgccccccaagagtcacagcagagaagttcacagggctttggatctgatcctgcatttccctaggccctgctctgggctgattctgcaggcccaacatctgctccatcttcactctgttatcagcatgccggtgggtggctgggccctgcctttccgagagggccctttgttaaagcttgattttgagagggaggttcaaattgcagagggcttgaaactaacttaaggggaaagtggttttgagaccttgccctgtcccaccccaggtgaaggttcatgtttgtggttttgtttgggcatcagacattccatctgacctcaaaagaagtcttgaactcttagaaaggagacccagctccctcaaagctagacaaatcaagcttggcccctctcttctgaccccccccctctttttttctaaagtgaaaaataactataaatcagcatgcctggcttgggtaatgggtcataaattatatatgaattggttcccagtgttgccgttccccgttcccctctctccttcctacagagattggtttagagatccagggctctgtaaggaggccattctccttcccatttgagtctacaaaaccagcgaggtgctaccctggcaccctgtggccctgaatcctgtgcactctgagcagagtggggcttcatgtgcattgttgcagagctgcacagctggtgtcaccagaggctccttcccttgtatggtctgtcctgatgaggacttgggattgatttattcccatccccaccccttggttcaattcctgagagactgagaagagaatggctttgtgcagggcaccccatgctggccgctccctggatagctcttcttttgtcagggtatgctgagaggacacactttgggccaactgtgaggttactcatacagaaccctgtgaaagtctgaaaaatctgccatcctgtccttttcagggggcaaaacccagaaatagctgtgtgttgtaactatgtgcatccccggctgtttgtctgcaggtgccagtacggttggcagggcctgtactgcgacaagtgcatcccgcacccaggatgtgtccacggcacctgcaatgaaccctggcagtgcctctgtgagaccaactggggtggacagctctgtgacaaaggtatgaccattgtgaagccttggggggtggcatgagggcttagtgggcgggaactgaggttatgggacaggttatgtatgtgaacagacaccgtgaccaaggcaactctaataaggacaacatttcatgggggctggcttacaggttcagaggttcagtccattatcaccaaggtgggagcatagcagcatccaggcaggcatggcacaggagaagctgagagttctaaatcttcatctgaaggctgctagcaaagtactgtcttccaggcagctagggtgagggtcttaaagcccacgcccaccagtgacacaccctctaatagtgccattctctgggccaagcatatgcaaaccgtcacaaacagtaatagccactctgtatttttggtgttgctggggcaacccaggtcctctgagatgttagtgctcagctgtagccacacccctggccctgtttaagttgttataggggctcttattaggaatgtgtttcaatttgcctttaaagttggtttatttggggataagccatatttttttaaaatggcatggcctagaactgggatcaattaggagtttttttccctaactttggttttttttttttttttttttttttggcagatctgaattactgtgggactcatcagccctgtctcaaccggggaacatgtagcaacactgggcctgacaaataccagtgctcctgcccagagggctactcgggccccaactgtgaaattggtaagtggccgagctgggagggggaggggtccctttgcgtttgtgtcctgcacatccagtttcaaaaccaaataggtttttgtttgtttgtttgtttgttttgattcacttttttttttaaaaaaagacacaaaattgggtgggtagaaaaggggtgttggctgtgataggatttggggggaggagtgaatatgatcaaaagtatattgtaggaaattcttaaaatatttaaaaatttggagctggaaagtggtagcttaaggtcacaggtggatgatcaccaaaggatccaaggatgtttttgtagctaaattcagtgacgcagtgaagaggtgcaggacagagctagacaagtggtgagaagacgctagattatcctatttaaatcactacagatggcattattttgatatggccttcataatattcatggagaaacatgatacgtgagtgtgagtgtgtgtgtgtatgtatgtgagagacagacagacagacagatggagagagagagagactatacactgaactcacttgtgaaaaagaagaaaaccgcttcaaagttgagactggttatcccagaccttctgtgaacctatgaaatccccaacactttgtgttgagtaggttgcaggcttttaaatgaaccggagttctaaaaaggtattgaaatctgccttgagccagcttagttggagagtgtcttcccttttgcgtcacagcacagcattgttacatctcaagcttgcttttgttgttggtttgtcatcggcttcaactagtcgcagaggcaggggactggcccttggagggaagggccagttttaccgcattttaccgcgttgttttaccaccttgctgactgtctttctcttgtatgcagctgagcatgcttgtctctctgacccctgccataaccgaggcagctgcaaggagacctcctcaggctttgagtgtgagtgttctccaggctggactggccccacgtgttccacaagtaagtcagtccaggttttgccatgtgcctgttctgcaaggttattgtgttgagagggagggttggtgggagagacttaggctgttcaatatatctatcttggtgacagagggctgggtgcattcgacaggttagtggctggtctagtagctcttgtatgattcctagaatctctttcctacccactaaggtggctggtgatgtctgtggtagaaatcaatcagattcccttgcatgtgtgtttggagtggtctcctccaatcctataggaaaggaatttagatcaactactgaatgttgtcttgaggtgccactttgctttgaggcttggccatattattggggtacttttcagtgaagaactctggtcatatatgatctcctccagaattaggcagtctgtggtctttagagagttagttcctgaaactttgagggttaccgaagcctgataatctactgtctttgacaccttaggagcagtgtgtggcatggctaagattgttctggaggctgtaggtgcttctgtgactaatggaactcagcaggcctttcaacctttcctgggccgtctttaaccagggaagcagcagttcccatttgggagggttgttatatagtcttggtgagcaaatttgtgaagagtgtgtggcacacattgtaaatgaatgagatctctggcaggggctcagaaaaatcttctaaggaaatcacaggcctaagatttctctatgtgtaaagaagaatgccttttccatgcctcctcttggtgtgcagcctctgaaccatgaaggaaagagttcttttaaaagtgaagattaagcagataagaatgtcccttgtcaccactgagttgatgccctgtgtgtctccggctatctttctttccctcgatgcttagggacggattaactgaactagggcagtgagggatttcaagctaaaataagggcttgggtcctttcatcacctcccttccctgttgtggcttttcttagatttgtagcaggtgtccgtccggttcctaggtgaagactcttcttgtggagagtgctgttgcattatctaattgccaagtggatcaaatgaaattaaattgccgcccctttcttgttctcattgcattggacagacatcgatgactgttctccaaataactgttcccatgggggcacctgccaggatctggtgaatggattcaagtgtgtgtgcccgccccagtggactggcaagacttgtcagttaggtaaggaaactctcgtgactgtaattctttgccaaggttggctgtgctcctcagagctgtgaggagggacgagcatgtggccagcagtgtgtgcgtatctgtatcccatcatacgaagtaatttattatcagggtctaacgagcctgggagaaataccttgcatgcaaatggcctagggtttttaggtcctgtgggaaagccctgggattccttgaaccatgtcaattgtcccaggagtgttcagctgggttctaaacagggatgacctcgtgaggaacgagctgtctgcattctttttgccacatttaaagcccagcaactggattgtgctgggttttgcacacaagtgcctggtggcttgctgtttgtcagccagcagcccaaaagaaagttatcaattagcaacccttgatggataaaggctgggagagggttccaacgctccaaatagaagacacctcctatttcttatttagctagcttgttaaaatgtctcatatttcagaccagcactatggtgttttcatttcaaggggacagcagtggggtgggggcagtcccccatttgtcactgttcatccttgctgcttttcagatgcaaatgagtgcgaggccaaaccttgtgtaaatgccagatcctgtaagaatctgattgccagctactactgtgattgccttcctggctggatgggtcagaactgtgacataagtgagtgactttgttttgattttcatgaaacttgggtgacaagtcttttttccattcatccccctccaacccctgctcgggttctgggactcttttccccttactttgtgatgttaaggacggaacccacagcttcttgatataagctgtttaagcaccttccagctgaatagaaggaaaaaccttattagggggaggggaagggaatgtttttggagagggaggggccaggctaaagcagtaaggaaaacatacaatttatcaggcttgttagttgctaaaattgggcatattctgataaggtgatgagaacaatgaggtgaagtttcactccctcgtctgggaggattagggagggtccccaccctgtggcatagccttatctcaccggaagcacagggaaatctgattgaaacttttatcagtcttgtacttttcaggtgaacccgaattcaatgtcacgtgcctccttaatgtgacggcttgtttatttttttcagatatcaatgactgccttggccagtgtcagaatgacgcctcctgtcgggtacgtaagtcattgcttgaacagaaaccttgtcattgcttgaacagaaaccttgcttgacacatgacaacaatcttttaagatttatgtgacacgggagagtcttgctcctatgggatttaaaatgctggtgagaagctgagtccctcaccaaccctagcttgtcaggagcctcttaaaggcaggcattcggaaccgctagtctgggcccaggcttagcacgaggccatttcagtgaatggcctgaaccacagcagtcttgtcaaatccctgacgacgtcctgggttcgtggatacatagataaatatgtatgtgtttctcccccttctcttctcccaggatttggttaatggttatcgctgtatctgtccacctggctatgcaggcgatcactgtgagagagacatcgatgagtgtgctagcaacccctgcttgaatgggggtcactgtcagaatgaaatcaacagattccagtgtctctgtcccactggtttctctggaaacctctgtcaggtgagcggaggcaaaaacttcaggtcaccaagctttagtgttgaaccctattctccatcaccattctttcccctccttgccccactctagttgtttagacccctgacaccaactagcaccccactgactggaggatgtctgctagacaaatgctgtagaaggcagagttgaatgatttcttattgattactgtggcctgtttgcttggctgagtgtcatcccatagccctgttttctatgctgtcaccgtgccctgggctttaatgctttcctgggacctgacgaccttaagggttacatgggtgtattctgtatagggggtctccttgtggaaggggttggagcaatcaattgtttactgcccagagaagtgatgatgacgcctttgttttcctttgatctgctccttcccactcttgccatatggcagctggacatcgattactgcgagcccaacccttgccagaatggcgcccagtgctacaatcgtgccagtgactatttctgcaagtgccccgaggactatgagggcaagaactgctcacacctgaaagaccactgccgtaccaccacctgcgaaggtatctccctcacccagggcccatctatccacagatgggctcctgccacctccccctagagctctgataagtggtaaatgggtgaggaaggttttcagatgaaacttaatctgatcacttagggaaacaaaaccatacggaggtaatctgtcaggctgctgttgggagagcccgagtaccgttgcccaagggagagaatgtgaaatccatttatcatcccagttcagaggtggccaagtttgtgacagaagagaagaattgctctgaggagcgctgtcagcaggggtctatagcagtggggaagttaggcgtttgtatcagttattgtagccatggctggctattggtgcttgagacacttttttggagtagttcatataaaaatacgtacacgtggcctatggctactatattgggaggcataacttaaagacttgtctagataggtttgtcctttagttttggttaagatgaaggagggctggacagtggtggcgcacgcctttagtcccagcactcaggaggcagaggcaggcagttctctgaattggaagcaagcctggtctacaaaatgagttccaggacagccagggctacacagagaaaccctgtcaagggggaagctggggtggggtagcagggaagtatagaggtgaccttctttgacaagcatttaacatgagatagatattaaggtgccattaaaagaaacttaaaaagactttctgtccacttgggagtcttacattttacctgtcataagaacattgttgggttttagttcccaagcacctcttgatgagttaactcattagcccaaggagtggccctatccaatcaggcaggcatacatgggctaagtcctctacttagaaatgctgtcggtgggtatgtggctggagtctgatcccaagcctgtgttcagtgattgacagctgcactgtggccatggcctccaacgacacgcctgaaggggtgcggtatatctcttctaacgtctgtggtccccatgggaagtgcaagagccagtcgggaggcaaattcacctgtgactgtaacaaaggcttcaccggcacctactgccatgaaagtaagattccacttggaacgggggagcccagtgggtacccagcttgggggagcagatgtatttgaattgctttaggaagaaaataaggtagaggacaagtagtggcttccttaggcccctgatggaggcattagtcagttgataagaccaccaatagtctcttgagctcttcaagatgattttggaatgttgtagaaccttcctttatttgagtggtccctcttttctatagaagctttccccccaggcctaccaaataagccaatgtgtgagggtcttaaaatggggaggtaccatctagaagccccggcacagaaagggtagtgatgtatccaggtacgtttgctaaggaggcagctgtgacaatgaccaggcggtgccccggtggctgcatgactggcccttcggctcctcagtttgcccatgcttcctttcccagatatcaacgactgcgagagcaacccctgtaaaaacggtggcacctgcatcgatggcgttaactcctacaagtgtatctgtagtgacggctgggagggagcgcactgtgagaacagtgagtctgctgctgcttttggggacagatggctccagggtgagggctcggggtagagcagggataacaccttcccttgggggaagccctttttttttttttttccagagatttctattatggtggctgtaatgatctcctgtatctccttggtatttattaaggctgctgggcagtagtgggaggagccaccactgggggatgatagaattagattggcagttaggttctttccaggcacgtattctgacttgttgacatttctgaccatcttgattttaattgccatgggcattccggaggattgtgtgctctttataacttgtattctttccgcctagccgagaacttgtctaaaaggttgatgatgaagttgaggtcctaggacatctcacttgttcttggaagatagcatagaaagccagggttggatcttctcatagtcgagctttgccccttatcatgacggacttcttcagccttgtgtctctttggttctagacataaatgactgtagccagaacccttgtcactacgggggtacatgtcgagacctggtcaatgacttttactgtgactgcaaaaatggctggaaaggaaagacttgccattcccgtaagtgttgctgccggggtctcctgtctgtcttctgagggaggggaactctctagcagagagactcatgctaaggtctttcttcaggtgacagccagtgtgacgaagccacgtgtaataatggtggtacctgctatgatgaagtggacacgtttaagtgcatgtgtcccggtggctgggaaggaacaacctgtaatataggtaaccttctgccccctaggtgggatttgctgcgggcaaggctattgtctgaggtggtctgccgccaggctcttaggaaatgatcatttccttgggtctggttctgccccttagaccaccttggatcctctggaaaagggtggtcttaacctgtttttgttttatagctagaaacagtagctgcctgccgaacccctgtcataatggaggtacctgcgtggtcaatggagactccttcacctgtgtctgcaaagaaggctgggaggggcctatttgtactcaaagtgagtggcctcccctgaactctttctgggttgctgcagcctacccaaaatacccatggggacttggaatcgaaaccagaagcacagctgtttgatgtctgctttcgtatcacctgggtccttactaatgacttgatgggctgcagccctgacctgggcatgagaaagttccctgggagataagtggagacagatgctgactctgttcccagccgcgggtctgaccagcagcctgcctcctcccattctcagccctccctactccctgttccctacaagggcctcttcctgtatacatgtgtcccacagcaaatgaaactgagtatggtccaggcctgcttccaatttagactaggttttcggcgtatttgactggtattaagtgtgacttttatcatttgggtgctatggaaataagtaaatggtgctgtgatggagacccccaaggctgttgtcttttctttgcagataccaacgactgcagtccccatccttggtaagtgcggcaacctcttaagctggttcttggctgttaggatgcatgggaatctcccgggatgatgctgaaaatgtaggttctgattcaggaggtctgcggtggggctgtgtgtttctaacaagctcccaggtgaccctgccctgctgctccgcggaccacactttaattatccaggttgtgtcttcatttagtgcaatgattctcaacctcaggctgcacaggggaatcacctggggagcttttaaaagtcccaatccctgggttgcgactgagacctaggaaatgagattctcagggggtaggacccaggcatcagtatttttaagctcctcggtcagcagcagatatggcctggggtgaaagcctgtgtttgtggcaggcacggcttccaagtgctgggtatgttgtggacctggatgtcggtaactaaggtcacctttggtttcttagttacaatagcgggacctgtgtggacggagacaactggtatcggtgcgaatgtgccccgggttttgctgggccagactgcaggataagtaagtgtcactgtatctgatgtccccttgtctgtcctcctcagcattcaaatctttcctctttaaaaacaatgaagaccataattccaaataaccctgacaactcaagccctctcctccctctagcttggatttaaaagtccctcgctgttgtcctccctcgtcattctctgggtggcacagccttctttgttctcggggagagtgccaaccatagaatttgacaattaagctatgagagagccctgagggaaaaaagtgtatgcatccctcgtgattagcatgaaattatggccaagccattgtccatgaagacggctgtctctggctccatagactgttttgtagtgggtttgaccaggccccagagaaacaattagtaggatcaaggagtaaggttttttcttagtgtttgttttgtttgtttttctttttgcctactttttaaaacatctttttcccacacaaaacagtgtaggaaaactcttatttttgttgttgttgtttttttttttcctcaaaactttaaaatgttagttgtatttgaagtcccataatctgagatgggctggacttgagcactaggtgagtaagttatatctgtttcaccttctaaagcgggtttggcaaaggcatctgtcccacctgtttttgtaaatgaagtttattggcacttggctgtccttacttgggcttgtctatttcctgcatctgcttacagggtgccaccagacaccactggttatgaccgactttatggcctatgaagttaaaatgctcgctctgacccattttcagggaacgatggtcagccttggtgtaaagtcagaggagagagaagctaagggaaaattgctccctttgcagaggttctcagatttaggaatcagaactgttgtggtctttggtagtcaggggctggtacaggctttgtgtgttgtgtgcatggaaattcaccaagtttgtatcagcatttggatgcttttgggcaatgtctgtgaaaaaacttcccaccgaagtctgaacttgacctcatttctcctagacatcaatgagtgccagtcttccccttgtgcctttggggccacctgtgtggatgagatcaatggctaccagtgtatctgccctccaggacatagtggtgccaagtgccatgaaggtaggcatgccagggtgtgtcttctgaattgagtgggcttcacagttaccacagctcacagtggggggggggggtgcaccatgctcaacggggaagggaacaaagcagggtggtacctatgggtttctgttgccacttagttgccatgtaacaaagttccttaaaacccaatagcttgcagtatccatttttgtggcttgtagcatgatagctgggcagagcactgattccaggcgcagttctggtcaactggtccttagctatctctgaggcatgttcttcttctcatgatagatggcaggcacacgggaggccagctcaactgggaaagctctgttacagggcctctcgggtcacatctgctgagactgctttagtcaagtgacccaagtgagcagtcagaggggatggatggccagtgcacgtgcctgacattgtgggaggagctgtcatcacgtggcagaggaaggacacgggtgtaaccaatttcttaacagggagggggtaaacaaattcagtctgtgggaaaagaaactcctacttaagcgtctccacctctcagtttcagggcgatcttgcatcaccatggggagagtgatacttgatggggccaagtgggatgatgactgtaacacctgccagtgcctgaatggacgggtggcctgctccaaggtagggcaatgaaagttgctgaagctcccaagtgttaatcatgggtggacattcctgctaagccaccagttcctcttctctcctctctaggtctggtgtggcccgagaccttgcaggctccacaaaagccacaatgagtgccccagtgggcagagctgcatcccggtcctggatgaccagtgtttcgtgcgcccctgcactggtgttggcgagtgtcggtcctccagcctccagccagtgaagaccaagtgcacatctgactcctattaccaggataactgtgcaaacatcactttcacctttaacaaagagatgatgtctccagtgcgtaacttctttaatggggatgagaacgtggctgcttgtttcaaagtagtacaacagtttcagagtagcatgagggagtcctctcctccccttagccgaaatctgtctcttagaacagactgaggcttctatctagcccgttgaggagacttgtgagccttttatttcatccattatttgacatttgtgttaacctttctaaaaatttatagggtcttaccaccgaacacatttgcagcgaattgaggaatttgaatatcctgaagaatgtttctgctgaatattcgatctacatagcctgtgagccttccctgtcagcaaacaatgaaatacacgtggccatcgtgagtagaagaccatttcactcctaattatttgattacaagggatttaagttagcaagtatcagacaacaattgcaatgaaaacattagctagtcttgttaagtttgagtgataactaccatgggtttgcttttattttagtctgcagaagacatccgggatgatgggaaccctgtcaaggaaattaccgataaaataatagatctcgttagtaaacgggatggaaacagctcacttattgctgcggttgcagaagtcagagttcagaggcgtcctctgaaaaacagaacaggtgggtgtctatttggaagatacccttgcctggtgactgtgaaaatgattctcctgcaccatccaggaaagtcctcacctagggaatgatcttccagccatcttagaagcccctcacttccagcctcctggcccaggctcacaaaatcaatattggtattggctgaggaaggcagagaggtacacctgacccattatcccactagcgtgctgtatgcattttcttcttggaaagctcccatgcataagaggtatgatttagatccagtgcaaagccctggggcacagcagtgcctgctctgagctgttgatgctctacagagccagttttagggttctagcacagctgaccctgaacactaaacagcatcactgacgcttgatggtgactcagggtattcaaactgaccctttgatgattcagagcctcgctgtttaggctgagctgaaatcaggacttctattttgggggaattggagttgtctgtgcttgcactgggtttctgatgattctgaactcagtcctaatcctgagccaccgaagtcctctggaactggaaataacccaatgtggagttggaagaaagacataggagtgctattctatccacctggtgcactgaacacaggtgtcctaaagaccagcttctggcaatagtgaacctatctgtgaagtttcaaagaggttcttgtccccacagtgcccctcttagggaccgaatacaggaagaccactgttggcattctgttcctatggcaatagctcttcttgagttaactggtccttggcttgtcttccagatttcctggttcctctgctgagctctgtcttaacagtggcttgggtctgttgcttggtgacagccttctactggtgtgtaaggaagcggcggaagcccagcagccacactcactccgcccccgaggacaacaccaccaacaatgtgcgggagcagctgaaccaaatcaaaaaccccatcgagaaacacggagccaacacggtccccattaaggattacgagaacaaaaactcgaaaatgtcaaaaatcaggacacacaactcggaagtggaggaggatgacatggataaacaccagcagaaagtccgctttgccaaacagccagtgtatacgctggtagacagagaggagaaggcccccagcggcacgccgacaaaacacccgaactggacaaataaacaggacaacagagacttggaaagtgcccagagcttgaaccggatggaatacatcgtatagcagacagtgggctgccgccataggtagagtttgagggcaccgcgggg

SEQ ID NO: 120 - DNA, 3970 bp, Mus Musculus
ccgagaggtggaagaggggggagcgcctcaaagaagcgatcagaataataaaaggaggccgggctctttgccttctggaacgcgcggctcttgaaagggcttttgaaaagtagtgttgttttccagtcgtgcatgctccaatccacggagtatattagagccgggacgcggcggccgcgggggcagcgacgacggcagcctcggcgggagcaccagcgctagcagcggcggcggcgtccggagtgcccgtggcgcgcggcgcagcgatgcggtccccacggacgcgcggccggcccgggcgccccctgagtcttctgctcgccctgctctgtgccctgcgagccaaggtgtgcggggcctcgggtcagtttgagctggagatcctgtccatgcagaacgtgaatggagagctacagaatgggaactgttgtggtggagtccggaaccctggcgaccgcaagtgcacccgcgacgagtgtgatacgtacttcaaagtgtgcctcaaggagtatcagtcccgcgtcactgccgggggaccctgcagcttcggctcagggtctacgcctgtcatcgggggtaacaccttcaatctcaaggccagccgtggcaacgaccgtaatcgcatcgtactgcctttcagtttcgcctggccgaggtcctacactttgctggtggaggcctgggattccagtaatgacactattcaacctgatagcataattgaaaaggcttctcactcaggcatgataaaccctagccggcaatggcagacactgaaacaaaacacagggattgcccacttcgagtatcagatccgagtgacctgtgatgaccactactatggctttggctgcaataagttctgtcgtcccagagatgacttctttggacattatgcctgtgaccagaacggcaacaaaacttgcatggaaggctggatgggtcctgattgcaacaaagctatctgccgacagggctgcagtcccaagcatgggtcttgtaaacttccaggtgactgcaggtgccagtacggttggcagggcctgtactgcgacaagtgcatcccgcacccaggatgtgtccacggcacctgcaatgaaccctggcagtgcctctgtgagaccaactggggtggacagctctgtgacaaagatctgaattactgtgggactcatcagccctgtctcaaccggggaacatgtagcaacactgggcctgacaaataccagtgctcctgcccagagggctactcgggccccaactgtgaaattgctgagcatgcttgtctctctgacccctgccataaccgaggcagctgcaaggagacctcctcaggctttgagtgtgagtgttctccaggctggactggccccacgtgttccacaaacatcgatgactgttctccaaataactgttcccatgggggcacctgccaggatctggtgaatggattcaagtgtgtgtgcccgccccagtggactggcaagacttgtcagttagatgcaaatgagtgcgaggccaaaccttgtgtaaatgccagatcctgtaagaatctgattgccagctactactgtgattgccttcctggctggatgggtcagaactgtgacataaatatcaatgactgccttggccagtgtcagaatgacgcctcctgtcgggatttggttaatggttatcgctgtatctgtccacctggctatgcaggcgatcactgtgagagagacatcgatgagtgtgctagcaacccctgcttgaatgggggtcactgtcagaatgaaatcaacagattccagtgtctctgtcccactggtttctctggaaacctctgtcagctggacatcgattactgcgagcccaacccttgccagaatggcgcccagtgctacaatcgtgccagtgactatttctgcaagtgccccgaggactatgagggcaagaactgctcacacctgaaagaccactgccgtaccaccacctgcgaagtgattgacagctgcactgtggccatggcctccaacgacacgcctgaaggggtgcggtatatctcttctaacgtctgtggtccccatgggaagtgcaagagccagtcgggaggcaaattcacctgtgactgtaacaaaggcttcaccggcacctactgccatgaaaatatcaacgactgcgagagcaacccctgtaaaaacggtggcacctgcatcgatggcgttaactcctacaagtgtatctgtagtgacggctgggagggagcgcactgtgagaacaacataaatgactgtagccagaacccttgtcactacgggggtacatgtcgagacctggtcaatgacttttactgtgactgcaaaaatggctggaaaggaaagacttgccattcccgtgacagccagtgtgacgaagccacgtgtaataatggtggtacctgctatgatgaagtggacacgtttaagtgcatgtgtcccggtggctgggaaggaacaacctgtaatatagctagaaacagtagctgcctgccgaacccctgtcataatggaggtacctgcgtggtcaatggagactccttcacctgtgtctgcaaagaaggctgggaggggcctatttgtactcaaaataccaacgactgcagtccccatccttgttacaatagcgggacctgtgtggacggagacaactggtatcggtgcgaatgtgccccgggttttgctgggccagactgcaggataaacatcaatgagtgccagtcttccccttgtgcctttggggccacctgtgtggatgagatcaatggctaccagtgtatctgccctccaggacatagtggtgccaagtgccatgaagtttcagggcgatcttgcatcaccatggggagagtgatacttgatggggccaagtgggatgatgactgtaacacctgccagtgcctgaatggacgggtggcctgctccaaggtctggtgtggcccgagaccttgcaggctccacaaaagccacaatgagtgccccagtgggcagagctgcatcccggtcctggatgaccagtgtttcgtgcgcccctgcactggtgttggcgagtgtcggtcctccagcctccagccagtgaagaccaagtgcacatctgactcctattaccaggataactgtgcaaacatcactttcacctttaacaaagagatgatgtctccaggtcttaccaccgaacacatttgcagcgaattgaggaatttgaatatcctgaagaatgtttctgctgaatattcgatctacatagcctgtgagccttccctgtcagcaaacaatgaaatacacgtggccatctctgcagaagacatccgggatgatgggaaccctgtcaaggaaattaccgataaaataatagatctcgttagtaaacgggatggaaacagctcacttattgctgcggttgcagaagtcagagttcagaggcgtcctctgaaaaacagaacagatttcctggttcctctgctgagctctgtcttaacagtggcttgggtctgttgcttggtgacagccttctactggtgtgtaaggaagcggcggaagcccagcagccacactcactccgcccccgaggacaacaccaccaacaatgtgcgggagcagctgaaccaaatcaaaaaccccatcgagaaacacggagccaacacggtccccattaaggattacgagaacaaaaactcgaaaatgtcaaaaatcaggacacacaactcggaagtggaggaggatgacatggataaacaccagcagaaagtccgctttgccaaacagccagtgtatacgctggtagacagagaggagaaggcccccagcggcacgccgacaaaacacccgaactggacaaataaacaggacaacagagacttggaaagtgcccagagcttgaaccggatggaatacatcgtatagcagacagtgggctgccgccataggtagagtttgagggcaccgcgggg

SEQ ID NO: 121 - protein, 1218 aa, Mus Musculus
MRSPRTRGRPGRPLSLLLALLCALRAKVCGASGQFELEILSMQNVNGELQNGNCCGGVRNPGDRKCTRDECDTYFKVCLKEYQSRVTAGGPCSFGSGSTPVIGGNTFNLKASRGNDRNRIVLPFSFAWPRSYTLLVEAWDSSNDTIQPDSIIEKASHSGMINPSRQWQTLKQNTGIAHFEYQIRVTCDDHYYGFGCNKFCRPRDDFFGHYACDQNGNKTCMEGWMGPDCNKAICRQGCSPKHGSCKLPGDCRCQYGWQGLYCDKCIPHPGCVHGTCNEPWQCLCETNWGGQLCDKDLNYCGTHQPCLNRGTCSNTGPDKYQCSCPEGYSGPNCEIAEHACLSDPCHNRGSCKETSSGFECECSPGWTGPTCSTNIDDCSPNNCSHGGTCQDLVNGFKCVCPPQWTGKTCQLDANECEAKPCVNARSCKNLIASYYCDCLPGWMGQNCDININDCLGQCQNDASCRDLVNGYRCICPPGYAGDHCERDIDECASNPCLNGGHCQNEINRFQCLCPTGFSGNLCQLDIDYCEPNPCQNGAQCYNRASDYFCKCPEDYEGKNCSHLKDHCRTTTCEVIDSCTVAMASNDTPEGVRYISSNVCGPHGKCKSQSGGKFTCDCNKGFTGTYCHENINDCESNPCKNGGTCIDGVNSYKCICSDGWEGAHCENNINDCSQNPCHYGGTCRDLVNDFYCDCKNGWKGKTCHSRDSQCDEATCNNGGTCYDEVDTFKCMCPGGWEGTTCNIARNSSCLPNPCHNGGTCVVNGDSFTCVCKEGWEGPICTQNTNDCSPHPCYNSGTCVDGDNWYRCECAPGFAGPDCRININECQSSPCAFGATCVDEINGYQCICPPGHSGAKCHEVSGRSCITMGRVILDGAKWDDDCNTCQCLNGRVACSKVWCGPRPCRLHKSHNECPSGQSCIPVLDDQCFVRPCTGVGECRSSSLQPVKTKCTSDSYYQDNCANITFTFNKEMMSPGLTTEHICSELRNLNILKNVSAEYSIYIACEPSLSANNEIHVAISAEDIRDDGNPVKEITDKIIDLVSKRDGNSSLIAAVAEVRVQRRPLKNRTDFLVPLLSSVLTVAWVCCLVTAFYWCVRKRRKPSSHTHSAPEDNTTNNVREQLNQIKNPIEKHGANTVPIKDYENKNSKMSKIRTHNSEVEEDDMDKHQQKVRFAKQPVYTLVDREEKAPSGTPTKHPNWTNKQDNRDLESAQSLNRMEYIV

SEQ ID NO: 122 - DNA, 36302 bp, Homo Sapiens
cagacgggctctccgggtccttctccgagagccgggcgggcacgcgtcattgtgttacctgcggccggcccgcgagctaggctggtttttttttttctcccctccctcccccctttttccatgcagctgatctaaaagggaataaaaggctgcgcataatcataataataaaagaaggggagcgcgagagaaggaaagaaagccgggaggtggaagaggagggggagcgtctcaaagaagcgatcagaataataaaaggaggccgggctctttgccttctggaacgggccgctcttgaaagggcttttgaaaagtggtgttgttttccagtcgtgcatgctccaatcggcggagtatattagagccgggacgcggcggccgcaggggcagcggcgacggcagcaccggcggcagcaccagcgcgaacagcagcggcggcgtcccgagtgcccgcggcgcgcggcgcagcgatgcgttccccacggacgcgcggccggtccgggcgccccctaagcctcctgctcgccctgctctgtgccctgcgagccaaggtaggagcccttctccgggcctccctcccagccgtcctctccctcccctcgcggcgccctgggcggttgagccccgcgagcaggctcggcagccctcgagcgcccgactcctcgcccctgcgcccgagcggctgcacctgggctgagcgcgccaactcccccacgggagcccctgcctcctgagggtgacccctccaggccggacaggggcgcgttcgctccgctgttgccccccgggaagtcgtcggatttcttccgcactcgtgcatttttttttttttttgccccggaatcatgttgagtccttgaacgtagtttcgcaaaattattttcactcggcgaggagggctcgtcggggcggggagtgggagggagtcgccacctctatactcgaagaaaacagctttctcccgcgctgacctacctccttccctcgccggcaggtgtgtggggcctcgggtcagttcgagttggagatcctgtccatgcagaacgtgaacggggagctgcagaacgggaactgctgcggcggcgcccggaacccgggagaccgcaagtgcacccgcgacgagtgtgacacatacttcaaagtgtgcctcaaggagtatcagtcccgcgtcacggccggggggccctgcagcttcggctcagggtccacgcctgtcatcgggggcaacaccttcaacctcaaggccagccgcggcaacgaccgcaaccgcatcgtgctgcctttcagtttcgcctggccggtgagtgactactcgggaaggaggccgggcggagcctcacacccgcgcctggccgagccctgttatcccttgcgagagggatttaaagggctttggcttgaaactaggcgctaactggggaaatctctaggggtggcgggtgagggagccgggacactatagttagatctcggctggggtagtcgaggtgggtcccattcctgctgctatttgcttagtgcacaaaagtggggatcccagagggtttatgggaccaggctcctaggaaggccggtgtaaacttgcaacttgaagttcccagagtaactctcccggccccaagccaagagatcgttgtagctgatctctttgcttaactaattaaacctggtgcgccgtggaaggcgactcggcgcagttctggcctgcgaacgccgtccaaattggcaacctcccctttcccgtgaacggccgggagggcgggtgtgtccttcctggagggtgtgggggagtccgtttcccgctgctccccgggagattttagtgtgtgcgggggcgctctccaggttcggcttaagggccgggggcggccgccgcaggaggaggttcttggggccctcacaggagctgtagacctgggaacccccgcccgctgctggccccttcctgcccccgcccccgagtggtgtagctcttgtggcctcacttccagcggttcccgggctctggaacagctgtgtttgcagacttccccgggaagggcgggtgcacggcccccgcaagccttcgggggccgtgccaaggcttggaaggggtggtcttctggaggtagtgcctgagggtgtaagtgataggccctcatccccccgccccattccgcccccaaaggagctcgaggcccgggcccagctggcagatcctgcagcgaggcccttgcaacatcccaaaatgggtggaaggaagatgggtgcgattgcagaaggggaggaaagggaaatgttgggggtgtgccctctgcctggctcctgctgtccaggaggcatgactcattgccaagactggggcttggcctagcctgtgctgggagggtgggtggtgagagggggagctcggtgccccagagcattgctttccaccacgtgctctaatggggtgcactctgctgcctcctgtccgccggcttaggttgtgattctgggaggagacagaggggagactatctggctgtgtctgtgtatgaagcttggggtggctcttaaaatccacgattacaggagctggcattataaagtgccctctgctgtgggtgagataagacagttatcaaaaactgccatgaaaaggggtttataaaaagaaaaattaaaaccaacgctgtctgtgaagctctcttgaggtccaagggctgtttctgttgtgggatttcatttttaccaagagtatttatcttgtttgttaatcccctattagggagaactttaagctaaagagtctggctgcgtttaaatctggctggcccaagctgactgtgaatactcaaactgcccttgaacgtgtgtttggagtttagggggaaggggcctgcaggtggttccaccctcctgccggaggatctgtctggagcccctcgcttttcacaagaccataaaaggaatcttattagtgatgtggaaaagcagcagcctggctgaggctcattttggagagtagggtcagagggatggctaacatgaaaacaaggaggcttgctccctcgctggccaaggaaaagtgacctagaaaagtgcgtctgtccgcttttgacacttggtcagagtcctcaatggaaaacgagcggaaatagtgtgggagggtaggagaggcgattgatttgcatttgctggtgctcttctgtggtttcaggccccacgggtcaccaaccatgaaatagactctcggcttttctcgaatgggggaagaccgatggggcaccactgaaaatgtggttcttttgaagttgggacaaacgcatgtatcactcataaacaagtctccaccctgatgccccagaaaggcctgctgtgaaacataagatttaattctcaagagaaattggagtttaggtgtatttgtttttctgtatgtggttggagaaacggcacagtccgtaactttcaagaatgattccaggctgagtagaaacgtaactgaaacacttaagtagctgagcgagtatttaactagagggcacagcttcatttagtttggcaattaactatgtcttttaaaactgatttccttgaatgggaaataaatgaacttagtacagaattcaagagatagcaagaaaaggatatatggttaaaaacaaaacaaaactccaaaccaccttgggctcccaacccctagcaggcacaattaccatttgcatgagtcctcccaaatttgctgacgctgggtatcagcaaagggtgcaggggtaggtcagtgtagaaggtcatgtagttcatgctttttgtttggaattatgacccctatccaagcaactgttcatgttctagagaggacgaggaggaaacgatttggtcagatatgaaatacagtccatgttctggtgtgcatgtgaaaggctttgtagaggtggcccttcctgtcatatatcatatctgagtatgtcccacgtggtgtcccctgccccggctctggtcttggggtagtttttcaccactggcttctaattctcatactgttgctgctctaaggggcttaacttgcagcaactatctggattaatgattctcaaattgggggaccaagtgataagaaccattattgtgggaagtaattgggcttaacaggaaataatttaggaattaccacttataaatcactgaaacggttaatctgtacctcccaaaattagtgctaaatcccagtagtgcctgcttattaaaaatacattagtgtaattaccactactcatctccaaaagctttttgggaacttcagaaccccagttagctgtattgctgcatcggtggccccagagtgaaatgaatctagagaaacgttaggggaagaaattggggtatctggcttattagcctcatatttaaattccattgatcctattaaaagacttgctgagatcaacttttttttttttttttttggaaaatccaatgaaacgtgattcttctgtgtgagggatgccagctttggcccccttcatgcttcaggcctgaatgaccaattgccacgatgctaatcacagaatgtaattgacaggcccttacttttatgccttttgctgtcttttccagtccctgagcttctgtagatatggtgtgggcacatggagggcttaaggatggggttctgatttgacctgcctcctttctgcagccaggatttgcatcctgcccgtgtagtcagcatgtatacaaagaaagagcatgtgtgtacgtatgtgctcagagcaagggactttctgcatgtggagaaaacgccttttgccctaagaagtctacctcaaaccaaagggatgaagtgatgtatctgtgttgcaacactgggcttgggggaaagtgaagctgtgcttgctttgaaagagctgtgctaagtatctgcagaatagctgctccaaaaatggaatctttattccaggtacttggtttctaatttttttttctcttgcaggtgtaaccttctgtgttttctttctccttgttgtcttgtttcttagcaacttattcaaacctccagtacttataggaatttgcaacccaccagttccacacccgtaattctacagggacttaagatgtttttagaaaacggtgaaactttggcgtggaggctcttgggggagttcagtgggttaaaaggagagtcagcagcaacttacaggcatgcaacctcccagaaaatcagcaatctaagtgctgctcaaaatcttcacaccaaatagtggtgcctttggggaccttttagatagaagacgtggaaagtttagcatggagaaaaaagttacttaaaaaaaaaaaaacagtgtcaaggtaacaaggagccttcacagttcctgatctgaaaacaggaatgtgaaccagaggccttggctggattcatatcacccactggccccattgtagaagggccagaagttggtcccaatgtccggctttcaaggttagtgacaatgtaagaatgcatgatctctggatgtgcatacaattagcgttgtaatccataaatgcaaatactcctgcaaattcttccatggtaaacttctgtaaggcatgttgctcttccacctacccccatccttcaagcctaggatctaggctgctgagagaagtgactcttggcttcagcttttaaatatatatatatctctcaaaacttaatcttttcttccaactgttggaagatacattgggatgaatggaaagtggtgattctaaaatggtggtggaaatggaggagggtcctgggttcagaaaaatcccacctttactttggtgcatggcactgggtggctgtgttgtgacttctttgctgatttctgattaccgcatggaccacagcagccctgtgactgctgttttttttttttttttttttttttatggtgccagtgacatctaccattggtgcagtgcgtgtgctgggaagaaattccgcaaggtggctcccagtagttaaaggagtacataaatagtcaaacatgcagagtcctctaccagctcaacccagtttttatgcacttttggtaaataaacagaaaggcttcttgttcaggcttgctctgtgtgaaccagaccgttgtgcttggctggcttcttggtattctatctattaacctcgccacccttttgtaactggtgcatttaattatcagtgggatgcttttcaaacaggtaagggtaatgatgggaaagggggtggggatgtctcattgagagtcacaaatctggatatgagctttggggccccttggtgagcctttgagtgggctttgatgagaaaatcaccctttgtaaccagatcggactctattgacatgtcaagccctacagacttgattgctttctgtgcctgaagtcttagcctagatgctataggatagttgtcctttcttatctcactttcccaaaacccactcgcattgtgtgcatgagtacgtgtgcatgcgccacacatggactccctgcaaccttttctgcttaatatgttttgtgactggaatattttatactctggccacccagacacaggcaggacaatagagttggccgaattgactgaaatgaggattatggagaataatagggcctctccaaaaataatgctaacacaggacaagcgacaggaagcaacagttgagtcagcagagctcagggcccctgacgaaccccgggagccgactgactgtgcacaatggccgcgttggcacgtcgggcattcccaggatgtgcgtgccgccggcgggcctgcctgtcgcagcagcctggggttttggacgccgcacgcgtgccgtttggatggcggtttatttgtgtccgtcagcttggcaggaggggaggcagccgcttctcagggcttggtttggctgtcactgttgccaggaaaaggaagctcccggctgccaacacaattacctttgtttcttacatccccccttcttaatgtggcaattaagtgcttaccgctctgcccagtgccaaggtaaccgccatggagtgggacagggcagagaacacaaccttggcacagcagcctaagtgtggagggcgggaggaggtgcaggggccccagccttgctgggaacctggtggcccttggatgccttggggctttgatgccaggactctcctctaggtagaattccacagaaatcttccaaaaagcaattccgaaggctgaccattcctctttgatgccacaccagaatgggaaccagctgccaggtttccagatttccttgggcttggagctgggaaggggctgaagtgactcactttgcaaatccagactaaagatctgtttgctacccctccttcctgtgtggccttcacagtactgttctggaaaacataaggaaagatgaaagccaggtgactcttcggcagagtcttagttctgtagtctgaaatcaagaaaaacccaggtatttgcttttgttgttgttgttttgctgtataaacttaagtttgaacacttgcctttccaagccctcctgggatggaggactccgcctctactgggggtcagagttgcagtggctgcttgtatgtgacttcggcatagtggatttgctgctctgtggcctggtccctgctttgatgtggggtgcatgatctgggatctcagtgcctgggtgtatgttcagggatgtacagaggtcaagtgtgggcctgggaaaaattaaagttctctagcaactaataatcattgttaaattatcttgattgctgatctatagtgtggggatggagtgggaggttgagtgcctcctaataggaaccttggagggaatcctttttctctgtagggctgggcaggaggaatcctcctgccccaggagaccctaatcccctccctgaaacagacaggaaaaaaagtccaggctttgttgccgtcactgtagctccctgccctcaccctgtctctgcctctgagaaagaagggcagttcctggaaaatcacagagccaggcacgtagggctgtgtgcaattcttttctctccaggtggggtgatgtcggtcagcaacttctgaggttttcccagttctggcgaggatgagcctggtagactgcttggtcgtccaagttcttgtgcaagacctaaggatgctttcctctttgagtattaaactgagttagtactgccatgccagctcagtcccggcaccttcccttgcagtggggtttgtgggtattatgtgtttagcgcttgtgcaagtctgtcaaaactcctggtatcaatgcatttaatcagaggattaattacaacaatactgttgaagtggaggacgtgggcctcaacgtgaccagcaaatgaagggcttaattatacagaatcagccacacatctggcctcattttgactgtgctcttacctcaaatcagtagagaaatataatttcttgctgctcttagggaagagtcctgtaatttgcaggaagtcctaagaaacttaaagaggcagtaaataaggtataactttcgctaataaaatagtaacaacagcaatgaatttggacctgtggccactaacaggagagggctgggtatgtgccctggcttgcccggttttgcttgcttttctgagcattttcccacagttatcagtgaacgaaatggaatcctactctgctttgagtatgaaacatatttcggctgaattccaaggcagggtctatcacaagatatttttatattcagagatgacctgctgtgtcactctgagagcgctaagctggccttgagttatgaatgaaactcccttttaccctccctttttctctttttcctttatcttataggtgctttctcttctcttggcagcagtgtgcttctggtggcacagcacggtattatttaatctatacacgcttctatttcctatggcttggtttctgacacagcaaagcagggattcataacctagttcatgttccttgtctaccccacctgccttgagtacatttcttcagtgccaagatagcagaagcttcatttaaacgctggtgttttgtgagactgaccttactgtaaattacgaaggaaaattttagaaaaggagggaatttgctaatagcttaggtttggctgggggtggggaggtggaattctgagataagcttggaagataaaaggtgccttcagtttaacagctggcatcttgccagtatccagggaatttgtttagttagtagactctgattattcttggaatgttagatcttattaacagataagttcatcaataaatataacccatgggtgtgcggttgtttctccctttgtactttcttccctgggatctgcccccaactccaccgcccaagtgaggttgacttctttgtcttgcagagtcactttgcatctaccccctcctgtttcctagagttacccgatacttgtgggagccaggatggtctcacatagacagagttttcaaaggggttctaaaaaggaaaagggggcctccctagagactgcctcaccagggcccaaagtgtaaccttagcaataccccctcggtacaaatacctggttaggttagcttagaataaattctttgtgtgtgtgtgtgtgtgtgtgtgtgtgtgtgtgtgtgtgtttcctcatgcactagggtcagggtctggaaagttttgggaaactatatgctaaatactctcatatcatatagtgaggtggcatttcctgatctcaactttgagctgcctgcatgcatgttgactccagtgcgtccctgccaggtgaaaggagtcatttgtcaacctgggaagagtgctgacaaaggaaggggagttggtttggatttaaacatccaggaactcaatgcaacaaccaacagaatttttattttggcattatggttttgtttggtggggtattctgggaggccaagaatgtacgagattttggaaagtcgaccctgtttctgaattgctaaattgtttgtttgtcttgcagaggtcctatacgttgcttgtggaggcgtgggattccagtaatgacaccgttcgtaagtatcgcttctgtggacttttctctaaacacacgtggaagtgtggggcttggccaaccagttggagctggatctgtctccttagtacttagcatttctgccacctcttgccttctgttctcccctgtaccccagggtgaaccttcagtggaatgtattccttaacttttctaggatttttgcttggaatattaagtggccagaacagaatcccagttaactcattccctgattatgaaacctagattatcttcgggatagagatcttaatggttttacaactttaaaaccttgtagtctgctaaaggatcaaagtagtgactttttaaaagtccatttaaactttaagtgagtgtttaatctctcatcagaaagataaagccataaaggtggtgctgggctctagagaccgaccttgaatttcacttggtgggcaggtgagcttctagtctctccgggtttcccacactgctccacaaacctttcattgaagcgcaattccagagcttcacagccattacctgccttgtccctttctgaaagatggctctgttttcagtgcaggttgcctttcaggactgaggggttggttttggtggataagccatggaggatgtgattgaaatgacatagtctggcttacaaagtagtcttgctctttaattgtaactttacagtgttttcgctcacgagccgaaacttcaagttccctttttgccagcagagtttgggttgcggtcgctggaaaacttgatgcgcactgaaatctcttggtctgtgcatgaggaagagtggatccagcttcttgtcttggctctctgttctctgaatgccttgtactttttgcttttctatcttaccattttttttttgtttgctttcactgtgaataatatattttcatctttccttgccttgctttttttgctgacagaaaatggtgaatgcacaccgtgggtgcagtgagggcttggtgcctgctacgtgggcagcttccacctgtggctggcttattgggctacttggagccacagaatcattgctgagctccgatgtgccagagagtcccaggccatttgggtcactcttctagcttgggaatcttaagtccagctttttggatgtcatcctccctggagggggagctcatgaaagtccaaggttcgagtcttcctccccagagggctaccctgtaatgccgtgggggggtgtgtgtgggggtggcagggaagctctgtcagccttggctatggctgatgccagtcagggtcatagacacctgtttgttctcccctccctgccacaaacgttgaggactgtgaacattatgtcactgtgacctgcttacaatggtaactaagcgttaggcagaaggggttgaggaggggggagacataggctcttctgtaatagtatggtgtcgacatggtgttctttcccctcccttttagctattgaaacaatccacccggtagagtgaacagcttgaggttgatcctggcctgtgataagagccaggtcagtatacttgttagggacatgtgagagacctccccgccacactgcagcattcacagcacctttcctggacctcctgtcacctcgcaggtcagggagttatgtcccctgggaacccagggcttgtccagagctacccacagttgtctgcatttccaggtagcccgattttggggttctaggatgtttcatctcctgggggggtaatcaaatccctggaagaggacaagaaagactgaggtaggaataaagttcttttaaacctcaagggtgcccattgcaggttatcaaaactcacttggtgaaccctgaagagggagatgggtttggtggaaatggtttctccacttgcctatttggcctcttttatgatgcttccaaggaatcttgaattcagcacagtcaaaaccaaactcaggatcttctcttgccaaaagcagtcccttcccagggccccttctgggtgtctggcaccgatatttgaacactcattgccataagccagaaatatagaaggcgatctgtgtaccccctctctgttagcatccatacctagtccacctccaagttctgaaaaatctctccagctcttcacttgaatctgcctgccttctgccactgccctggtccaagtcaccatctgctcatgactgaacttagagtagccttcgtctggtccacctttatctgctctgactcacctctagtgctttctccattcttctgccatcctggtcttttcagagccataacatttgcttgtcacccttattatgaaaaaccaaccacttggtggccttctgttgctcttgggacagatcttcatgtggcccacaaggctctgtgcagcccagctttgtctccctgccagccttgtcttacacaccgtgttgtccatcgtatctgtagcctggccataccctagcagttgccttcctatcctcaactacatcacatgctttctggcctcaggacctttgcacatgctgtttatgctacttggagtgttttgttcctttcttcaccctcagccactccctctggactgcactccacagggcagaagctgaggatgttcagaagcccaaacggagttggctgccctgtgggacccaagcgagttgtaaacattctggcttcagatgtaaatcaaaggcagagccctgagttttagggcagagaattccttctatcagctctgcagtgagccctcacaggcagactcgggcccaaatatagcctaggtgctgtttatgtatttgaaagtatttaaggctggtccttctgtcatcggtcctccaaagtcttttattacattttgggactgtggtatatagagttccaaatttctttctcccctagagcaaatggtttcagtttactgtaatgcataataaacatgtaaacataaataggcacacttcagaccaggttttccctgtagcttagctttctcggctaaggcccccttccaggtttttgggtcggtgtggtcccaggttatgctcagactcgcccttcatcacctcctccttggcctgcgaggcggtcatggcttcttcgtgactcatcttcgtggcactggggattgcagggaggcatggtgatgtccttttccagtcacaaggctggactgccaaacgaactgccacagattcctttccagtgccccaagctgaaggaaagcgtgatcaggaagcaggcagcagacgtatttgaacccagacatgctcgaccccctccctgagcaggtgtgaaattatgtatgcagctccatagctccactgaggattctgaagtgatcctctgcacgacacttcccggaaataagtggaaagcttactgcatgactgaaaagtacatatcagtcctgcacccctaggattgccctggactcttgtctaaactgtttgttgttgataccagcctcagaagctggatgcctttaagccatggctagtgtgtttaaccgatcccttttatgaagatcttgtaagcgcgtggtaatagcccactatgctttttaactgaaccagcagagcaaacatagttaatggagagacatttttgtcattccttggcctctgtttatttgcaaaaacgagtaaagtgttacctgcctgcaagtggttcagtgcgtgccggggtgtcaggctgcaggtatgtgagcttgttcaaggcttgtcttgcccacgcagcagtttgagagccctagagggcgaacgctggggccctgttggaagcggtgtgtggatgaagccacccaggagtcccttctctcctggtcacttatagggcttgcatcactttttaaaggagcactggcccgaggcctagaaaaacagccatgtgggtgggtaagaatcacaaagacattgcaagtcagtcctaactgtctctccaagatggtcttgaatttgacaaggtgatgaagagttggtgctggcaggtttaagaaaacaaacacaaaaccaggttggggtgctgatttagtgccttgctgccttttcagatccctcccctgaactgctggcacctgatgtttgagctatttttgtacctgtctcttctcaaactagatgataagtggcctcagggcagggactacatactcctgagagctgcttgagctcgaggtgtttattatcctcagtaagcattttttttcaggagcatgacttggctcaaaaaaacaaaaagaaaaaagaaaccctcccctcaatttacctgtgtctaaactttggtgaattattctcccatctgccttctgggcagaggagaaaggtggaatgcatcaagttcaaggtcttggtatttaagagctggctttaaaggttgccatgttaacaattgtaaaaaaaaaaaaaaaaaaaaaaaaaaaagtaactcaatcgtctccttggcttccagttaagagttttgaaatggacaaaaagcttttctgagcaagacataaaaccctaaaaccagaaatgattgctgacctttatctggaataatgaaatttcttcaagagcaacattccatagggagctactgtctctcatatgtaaagagcacttgcaagtcagtatggcaatgtaatagaaaagttggcagagaagagaagctgttgctgttcacaggaacaaatataaatggttttgtaactaccagaaagggctcttgccatcacttagttaaatgctaattaaatgagatacctctttacctatcaggcatagattagaaggtttgataatgtacaacgttggcagtgttattgggaaacacagcttcctgggtggtgggaggacagactggtagtttgagactgtggacagaggttgatttgttgtgcacggactctgattcagcacttccatttctagagtatctcattgtgggaaccatacacaggcagatacgttcaaggaatgctcactgtggctttgtttaatagtaagaagcccaaacgactcacatgcacacatgtcagggactaggtaaattatttattggtgtttccagacaatgaaatactgtgtacccattaaagaaggtaaacaagtggtaacaggttgtctctgggtaggggcataaacttttcatttctttgccttttttacaacagatagaattttgtagcaggtgcatatgtttttattttaaaaagccaaaatggtcagggaagaaggctgcaatgtgaatattaacatgattcatcactttgtctctagaacctgacagtattattgaaaaggcttctcactcgggcatgatcaaccccagccggcagtggcagacgctgaagcagaacacgggcgttgcccactttgagtatcagatccgcgtgacctgtgatgactactactatggctttggctgcaataagttctgccgccccagagatgacttctttggacactatgcctgtgaccagaatggcaacaaaacttgcatggaaggctggatgggccccgaatgtaacagaggtatgtgtgtgtgtgtgcatgtgcacgtgtgcctgttgcttttagtgtccatttatcaccccaccagcaggcaggtggcatgcggctatctcaggtggggtgggattttggctgttattctgggcctgcagtatgaagatgcggagtgtagaagatgctgttggtgccccatccagatcccctttactggcatccccatcccccaggtgctgtgttggctgccaacagctcacagctgctccttctcaggagactcgtccttggccaaaccagtgcatgccccattcctccagctcacagtcagtgattgacagacatagggctacaaagcccagcttcctttgccttaaaacagtagtacaatttgcactctagagcttaccctgggattaggctgaaatcagactccagttgagaccatgttcttgctcagctctttcccctaccccatctgcttccctcaattccttctacctatgtccagatccccttctcagactctgcttctaaggaacttgacccaaaatagatccagacaggactaggtcagcccagttgttgtctgaacaggctatcctataggaaatgatagcccctgcattcagggtagccttgcagcaagttttcactaggtgtctttgggggcatggctttgatggggagaggtatgtggttagctcaagctttcctattggtgtaggagtgggcccacttttagtctctgtgctgtctactgtcccagtccctttatagaattcagtgattccaattcatagcaacttgatgggtaattctgttaactgtataatatcccctcatgagcaataatgtactctgcttattttacatgataattaggtaaattgttttgatagactcaatttcaaagtgagtttttcaaccatgagagaggggtgggtcatgggggaaggaatttacagctctcccgggtagtactactgctttcttaaataattggagagaagagtttaaaaaggatggcatttctggaattcaaatgaaaaggggaattcattaacatattttagtgtgttttaaaaattaaacgacctaacacttagtgtgggttttttgtttggtgttttttttttttttttttaagataaggtgctcactttgtcacccatgatggcacaatcatggctcactggagccttgaactcctgggttcaagtgatcctcctgcctcagcctcccaagtagctgggactataggcacatgccaccacacccagcttttttattttgtgtagacatagtcttgctatgttgttgaggctggtctcgaactcctggcctcaagctatccttctgcctcaatctcccaaagtgttgggattataggcatgggccactgttgcctggtcttagaaactgacattttttagaagttacttttttcttttttttaaacgaagtagagaattgctctgcaaggatactttataaaagtctcaccagatctggccaccagattagcctgcccaatgagtccagcctggctggctctgttagtcccatggaattttcaaaccaggcatttggtatgggttgtttttttttttttttttttttttaaaggctgaggctcatctgaatgtgtcctggtgggatggggaaggattatctatacctttttttcttctaatgaaaagggtgtgggcagaatggaaactgaccaagctctgctcaaggagccagggtagctgtggtttagagaggctggacgaaggtcccccttccctcgtcaacttgtctgcattttgtccccaaacaatatcatgttttcagaatctgctaacaaggccttgaagtttaaagctggttttgttatttgggcccctcccatcttcctctccttacaagggacttgatatgagacctgttaaaatcgtggaatttgcagactttaatgcaatgggccattctcatgaccggggcgatgcaaggaacaggcagtgtgctgacacgcccttctctgttttttacagctatttgccgacaaggctgcagtcctaagcatgggtcttgcaaactcccaggtgactgcaggtaaatcaactggtcttttgtgagatttcttttaattttcctttatgtaagagaggaactgactttattgtgactatgcctcttttttccttggagaacaagaaagcttttttaaaaaaaaaattcagatagacacatccgaagcttattaaattataccagctgtctggtggaatgcacacaccacttctctcttggaataaaaagaaactctttgggcatagccagtgacttcatgtattaactgttctgtaaattgataacacatttttataatcttcccttatagtgctgatgggctagatggagggatgtgggcttgtttctttgcgtctctctcctcttccaccaaggctttcttctcccagccccctccccgacttttcccatcaataggcgaaagtccagcattctttagaatgggattagtccaatctcctggcccctttgcaggcgggagctgggttggtgctgagaggttaatggctgccctggaatcttgtcagttgagcctgatgaatgtagacttttgctgcagtcctttgaagtctgttcctttatggtccaggaacaatgcggaagccaaagggaggcctgccctgaccacttcacgatggcgggttttggaacttcttgaaatttatattacgcccgtttggaaaaggcttattttgggaaatattgttggtgtctgtggtgtttttggcagtcttaatgctttgctctccctcctcccaaattttaaggagtaacgctaaatggatcctttgagcctgtcacttttgcccccaaagctactctgacatgagtaaagggaatcttatgaaacatagtctaaaccagtatgtcccaaactaatgttatttggggctcttattaaaacgcaggtcctgattctataggtctgggctgagcccaggtttctgcatttctaacaagctcccaagcgatgctgctgatggaaccatcagcaatcactgcccccagacctcagtactcaaagtgtaacttccagaattaacaagggagctgttaaaatgcaggttcgtgggctccgtcccacatccatagaatcctagtccttggtttggcccaggagtctgcatttgacaagctggccacatgactttgctgcttagtaaattttgaggctactcctttaaagagaactatctgtggcctttacctttatgattccaccgctccgtctgttcccctcccatgcaagggggaacatggaactaaattaagaactggttgtcccgaattgtctcttcctacacttcagaaagatagtttatttcctggaaggctgaggggcttctcctgctgtctcccattggtggcgatggactgtagtatttaacagcattgctgtccaatgcggagcaggaatccacctaccttaactcttcctaattaagggtgttctggagaaagtcccaatggcagtgctattagtgattccaagcctgctgcctgctcagatggatatcagcggaggccgactgtgatttgtgctgctgtcatcagaacacacatacagctatacaggggagggccctcccagccagaacaacaggctttgtttccagaatttagccctttctctttcgaagtcccacctccctctccctgcccagacacgcactgatggccttatttacttaaggtgcgactttcccacacatcatttgcatagtctcccagcccagttttccctccctaccttgaaagaaagtcaaaacagaaccttcacgctgaggaagttcaggttgtgtcctgctgcagaaatagttgaatggcaagttacctgcaagttgtcttttggattatgtattacacaggttattttttttttcacccccacatgagaaaatttactggtttttgttgttcccaagtagactgagtccctttccctgggtatacatgcttgcttattgcaagcctgccaataatatcaaacttaattatgaatcatcatctgaggaaagtcacttcaatttctcatgagaatcttaatcatatattattaaactgggataacttggttggtgcctcttttagggtcagtatttttatttgttttcttttgaagtcatccatggcctcttgtggttgcttttttatgcttggggattgaggtctctttaattaggtgaggttgggtcctcagctgcctctccttgcctttatgaggcaacttgaagagggctagtgatcctgaatttggaagagaataagggaagacggtgagaatattgccatttcgtaatcagttccctcttactatctttcaggctaagaatatcagccttgacagaatggctacacccttacctcccactaacgtgggtgtccgcttttgagaaattatttagattgtaattttgttcttatcttactcctttagtcacttgtcacgttgacattccattttacataaaccagaatccagtgtctaactttaaaccacacattctagtgatttctttgcatgtgggtgtgcatagcttggtttcagaagttaggaagtggttagtcagtattctcaggggttaagttgactctcagccgtgggtgattagctattagctagatccctataattttcccatgacaaggatttgctagcctgcctcccgctcttgggaaaccgaaagcctttccttctggggagctagagggggcgggggttgttttccagagttacagctgagcagcttagggggttggcgctgatcgtggcttttcccaggtcccgttctggaaacatgttgcccatcccacccgcaccccaccctccaccctccaccctccacgctccaccgggaggctagttgatgtttctccctgccttcccccacccttgttaaagcttggctcttgagaaggcaattaaagtttcagagggcttgaaaattcaagggagagtggtttgagacgctgccccctctcccaccccagatgaaagttgttgtatttgtttttgtttttgcttggggatcagaggcactatttggccccaaaagagtatgattaatcaaggtgcttatataaaagaacctcaactccgccaatactagataaattaagcagactgctttcttttttttttcttttcttggcaaagcaagaaatcactataaattagcacacagtaatgggacacaaattatggagttggttccaagtgttgtcatttccttctccttccctatagaagtgggtttagagagcctactctggctttggccaagggagggtgcccctttctctccttgtttttttaaataaagcgtcatcgtgaggcagtttcctgctgcacttggtggcttgttgcatttctgtgcactggggtcatgactttctgtgcagacaaagagcagagtggcaagtgcagcgtctgcagagactttggcatagctctcttgtcaccgagagagtcctttcctctatagtctgtcgcaactaggtgcacgggttgatttattccatgccttcacctttggctcactcgtgtgagcctgagaagagagtggctttgtgaagggcatccccatgctggcctcttcccaaacagccctccttttgtcaggagtcggctgggaggggacctcagctcaactgtgaaaatgtttgtttatacggagcccctgatgagccttgggagtctaccttcctgtccccagaaacaaaacagaaaaagcctggactttgcagtcttccatttgaattgtacaggtgtctcttaacgttcaaaaggctaacctggaggtgtgctgtgtgtctccaggtgccagtacggctggcaaggcctgtactgtgataagtgcatcccacacccgggatgcgtccacggcatctgtaatgagccctggcagtgcctctgtgagaccaactggggcggccagctctgtgacaaaggtatggcccttagggatgagacccagggtgggatctgggggtgggatggcactaatttggtttctaattttattggcaggggcttttattctgaattctccttgaatgctgtgtgggttttctggtttttctttttaaaagacgactggggctagaaacatggtgggttcgccatcttcacaggcgtctcttagtgactccaggatctttttggcagatctcaattactgtgggactcatcagccgtgtctcaacgggggaacttgtagcaacacaggccctgacaaatatcagtgttcctgccctgaggggtattcaggacccaactgtgaaattggtaagtggtccaagatgaatgagagccctttgtctaatttttctgtactcagcttttaaaaaatatacttaaggacttgtttaaggaaaaaaaagtgaaaatagcttccaaagataggccttatcccaaccattctataagcctttgtaactttcaagtctctaaagttttttgggtgatgctgattcgtataggaggcagcgggagatgaaatgaccccagctctgagatgtcttggaatgtggttagagacagctcagcgagaaagatgacttcctttctttcctagacacagcagggttctatcacacgcttgcttttggtttttgaaatatgcttgcactagtggctgtggtgtgggattcggttggaggggggtgtggggaggtaacggtgtgcaggcatccctctctgactgccatcctggtttttgcagctgagcacgcctgcctctctgatccctgtcacaacagaggcagctgtaaggagacctccctgggctttgagtgtgagtgttccccaggctggaccggccccacatgctctacaagtaagtccaattttcagcctgtgtccattctaaggatccttgtgccaagataccacgctggggagaggtacctaggcttgtccagtgtgaatgtctcggtgagagaggggcgggtgcaggcctaagtctggtaagcagtctggtggcttgtgtgtttggaagtctcccagcacccccatcctgtcccactaaggtagcgcatgtatctgttcttggaaggaacgtcctcgtggaatcgcttgttcctttgcatctgcttcctggagctggccaccttccaattgtggttattcttcttgcagccatggagaggctgccttcaggggaggttgtcacttactactggattctgtcatagggccagggggccccagagaagaacctggcctgcagagttcctttggctgtgagacagggctgtatatcagaatcacctgggctgctttacagtgtaaatctctgggtcccccagattccctccagaatcggggagtccatggtctttgataaacttctggaattctgcagtgcagccaggtctgagaaccgctgtcatcagcaccccaggtgtggttatggatgtggatttctggggtcagattgcctgtgctggtcctaggcccccacctgtcacttgcggaactccagcaggccacagaagctccccgggccctctttaaatggcacagtagcaattcccatctccgaggttgtcataaagacacaaaagtgaatacttcataaattgttaggagttgtctctggtcagagcagaagtggagaatgcagcctctaggtgtgctattttgggcaaactctgtaagcaaatgagaggaataaggttttccacctgtaaagaactatttttcctgacttcttagctacttctgagccatgatgaaacttttctttaaaaataaagattaggcagatagagatgtcctgtgttcctcctgggcggatgctccgtcagtatccagctgtctttctcccccactgcttaggttggggattacatgaactggggcagtgggggatttaaagctaaaatcaaggcttcggccttatcgtcaccgtcccacttgtcctgctgtagctttccttgtagcaggtgtctggctcttcaatgacagcccctcatgtaagaggtgatgttaaaggatctaattgtcagatggattgaattaaattgtcaaccccctccttttcttgttgaccagacattgatgactgttctcctaataactgttcccacgggggcacctgccaggacctggttaacggatttaagtgtgtgtgccccccacagtggactgggaaaacgtgccagttaggtaagaacatccctgtgactgtaatttttataccaaggttggctttgattgtcaaagccattacagaagacgagcgtgtggccggcagtgtgagttcacactccatcatgctaagaagtaatttattatcaagagtctagcaggcctgggagaaataacttgaatgcaaatggactagctcttttaggccctgtgggaaagtcgtgggattccttgaaccatgtcaatcgtctgtccgaggagtgttcagctgggttccaaaaggggatgatctcatgaggaatgagctgtctgcattctttttgccacatttaaatcccagcaactaggctgcctgggttttgcacagaaatgcctggtggctttctgctgttttgttgggggctggttaactagcagctggaaagttatcaattagggttcttattggataatagctagggagagggatcagatgcttaaaatagagggaacctctagtatcttttatttagctagcttattaaaatgtctcatgtctcagacaaactctggcctgttctttttttttccaaggtgggggagatgggggttgaacttcatttctcatgctcatccccatctcctttcagatgcaaatgaatgtgaggccaaaccttgtgtaaacgccaaatcctgtaagaatctcattgccagctactactgcgactgtcttcccggctggatgggtcagaattgtgacataagtgagtgactttgtttccattttgattttcatgaaacttgggtagccgacttgctggtccgtactggggctccagtcctaggacttgagcagtagaaggaaaaccttagagtgggaatggttttttgagagggagtggtcagggcagcagtgaaaacatacactttatcaggctcattagctgcgaaaaccagccatattctgataatgtggctgaaacaatgatgtgaagtttcactccctcattctggaagaattagggagggtccccacccagcgtaataaccttatctcacggaaagcacacaggaaatctgatttgaaacttatctatcctgagctgagaaggcttttcaattaagcccaatttcactgtaaattacctctttaaaatgatgacttatttattttttagatattaatgactgccttggccagtgtcagaatgacgcctcctgtcgggtatgtaaatctttgcttaaatcaaaactttgacaattgacaacaaatctttagatttgtgcgacactaggagagctctgtccctgtgagatttaaaaatttgggtgaaaaaagagtctcttggaagtttcgctagggcttatgttaccccagcctcgtgggagtcattttgaaggcatgcacatagaaattcctctaaccactttcagaggtttagcatttggctatttcagtgaaccagctaaaccgcaacagtcatgctaaaccgctgaagccctgtgtttgtggaatacatagaaaaaaagcatgtgtctctctctccccttctcctcttctaggatttggttaatggttatcgctgtatctgtccacctggctatgcaggcgatcactgtgagagagacatcgatgaatgtgccagcaacccctgtttgaatgggggtcactgtcagaatgaaatcaacagattccagtgtctgtgtcccactggtttctctggaaacctctgtcaggtgagtggtggcaaaacctcagatggccaagtttttagagcagagccgctgcctcctccgcttccctttacttttccctcagctcttgtgtctggaatttcctaacatctattaacatcctattgatgagagagtctctgctagacaaatgctggtggaaggagatactgacgaattattttcttcttagtgtcttcgtctttgtgttctttttggttccctccaccccctcttgtgctccctctcccactctgccccgttgtttcaaatactggacattggcagtccctacagcatagagatgtatcttacagggtgtctcctaatagaaaccgaaggaactgtcagattccagtgcctgctgccccagagaagttatcgtgacacctttgttttactctgatccctcccccttttcgctgttcctgatatttgcagctggacatcgattattgtgagcctaatccctgccagaacggtgcccagtgctacaaccgtgccagtgactatttctgcaagtgccccgaggactatgagggcaagaactgctcacacctgaaagaccactgccgcacgaccccctgtgaaggtacctcccttctcccgggacctggctgtctccagacttgctccttttgtccccacttactaccactgccccttgttacacttgagaagtaatgtattggtgaggaggacctctatagtgaaatgatcctgcctgtgtagcgggccgcaacacgtggaaacaatctattccggcctgccagtgggagagccgtgtctacaagtagcccaggggagagaatgtgaaatccatttagcattcctgttctggggtgggctgatgtgcaacgctgaggcaaatgcctgagaacaacactgtcaacagaacttcctgcaacggcagacagagggggatgttctgtatctgcacggtcaggtatgggagccccaggccatgtggactgtgactagtgtaactagaaactgattttatttcattttagttcatttaaatgtaaatagccacatgtggccggtggctgctgtattaggcagcacaacatttaaagcttctataagattgtccttgagccttgcttaagatcaaaaaggaagtaaataaagcaggtccttttgccttagcaagtgtttaccaaattgggtagatgtcaaaggtaggatgaaggggatccacaagcatgtgggttttcctggttgtgtggagggagaaaatgctttaaaactctttgcctggagtctcaactttgcctgtcataatgtgatgtggcacgttgccagtatcttggcttccctggggtgtgtctcattagccagagggtccctgtctccaggaaagtgggcttggcccaggcccttggcttaggaatgccgcatctgtgggtgcatggctgtgatctgatcccaagcctatcttctagtgattgacagctgcacagtggccatggcttccaacgacacacctgaaggggtgcggtatatttcctccaacgtctgtggtcctcacgggaagtgcaagagtcagtcgggaggcaaattcacctgtgactgtaacaaaggcttcacgggaacatactgccatgaaagtaagactccctcatccgggaatggaccagtgctccccagcctgcccctgcccctgcctctgcccctggcccaccctgggatcattggtgttgaaagttttttttttttttttgagaccgaatttcgctgttgttgcccaggctagagtgcagtggcacgatctcggctcaccacaacctcggcctcccaggttcaagcgattctcctgcctgcctcagccttcctgagtagctgggattacaggcatgcgcaccacgcccaccacgcccagctaattttgtatttttagtagagatggggtttccccatgttggtcaggctggtctcgaactcccagcctcagatgatccaccccccgacccccaacttggcctcccaaagtgctgggattacaggtgtgagccaccatgcccagcagtgttgaaattgttttaatcagaaacagtaaggctggggagactggttgagacttatccttacatctgggatctaagactgaggtcgtgttcaatttaccagatcactctgcctcggagcctccatatctatgttggaacattctggaatgttgctaggttgggtgattcctcttttctgtaggagtttcttccccactttcacctagtaccggtgactaaatgcccatgtgagggcattaagtgggtaaggcactctctggaagcttctgcttgataagccgcctgtctaatttgagaaacagccctgatggagggtagcaggtggaggtgccaggtgcattgtgtcaggagggagccatgaaaactgctgaacagtgcttgtctatggcttcacaagtccttcagttctttttttgctttactttgtttcatagatattaatgactgtgagagcaacccttgtagaaacggtggcacttgcatcgatggtgtcaactcctacaagtgcatctgtagtgacggctgggagggggcctactgtgaaaccagtgagtctgccactctttggggagctctgggatgtatgggtcatgttggagggatcccacttcaacgtgggaaaactttctttgtactggaaatctctggaagcaagaccgcagtgatttctgcactgggacagtatcacttgtgtctcatttgcatttatgagtcctgatgatagcttatggggaggagcttctgctgaggacctatagaattagactgtgtaataaatattcctgcttgcaaggaaagtcatatttctactttcatttccatgggacttccagaggcccaccccacatcttgcctaacttgtggcattcaaagtaacccagttgggagctcctttattcctggaaaagcctgattgtgttaaagtactacgactgtggctgttctcagaataggatgttggatgtaagcagtaggaaaggcttggctctcgcctgtcgtgaatggtcctggatctcgtcttcagccgattgtctcccctttgattctagatattaatgactgcagccagaacccctgccacaatgggggcacgtgtcgcgacctggtcaatgacttctactgtgactgtaaaaatgggtggaaaggaaagacctgccactcacgtaagtggtagttggccttggatgctatctctgggacccttccctctgtcttctgtgggagggggccactgggactcacactgaaatattttcctccaggtgacagtcagtgtgatgaggccacgtgcaacaacggtggcacctgctatgatgagggggatgcttttaagtgcatgtgtcctggcggctgggaaggaacaacctgtaacataggtaactttatgccccacgtgggatctgcagtgggcatggccacctgggcgtgtctgctggttggcccctggagcttatgatatttctctgggcctggttcttgcccctccagactgtttctggatactcagggagggtggtcgtgtctgctcttcttttatagcccgaaacagtagctgcctgcccaacccctgccataatgggggcacatgtgtggtcaacggcgagtcctttacgtgcgtctgcaaggaaggctgggaggggcccatctgtgctcagagtgagtgtcctccccccttgaactctcccagggctgtcggagcagatcctgacacccttggggacttgcaatggaaaccagaagcagagctgtttgatgtctgcttttgtatcacctgggtctgcattaatgacttgatgggatacagccctgacctgggcatgagaaagtcgccaataagataagtggagacagatggcgtctcagttcccagctctgggtctgaccagcagcctgtctccttccattctcacccccacccctatcccctaccagggcctcttcctgtgtacatgtgtcccacagcaaatgaaactaagtgtggtgcgggcctggttccaatttagcaaaggtattttgctggtgttaactacgactttatcatttgggtattaggaaaataagtggtggttttacttagggctaagaccgctttccctgttgaagtcctcactattaagttgtcttttctttgcagataccaatgactgcagccctcatccctggtaagtgtgacatccttttaagccagcactcatccactatcgtgtgtgtgtgtgtgtgtgtgtgtgtgtgtgtgtgtgtgaagaatcacccagggattgtgtttaaaatgcaagttctgagtcaggaggtctggggtggggcctcagactgcttttctaacaagctcccaggtgaagcgatcctgctgccccatggaccacactttaattagccaggttgtgtcctcatttagagcagtgatttttcaaccttggctgcacaccagaatcacctgggagcttttaaaaatcccgctgcctgggctgcaaccaagacctgtgaaattagactttctgggggtgggacccaggcatcagtattcttttaaaattccccaggcaacggccatggggtgagagccactgactgtaactggtgtggtgacatgtgagtgattggcagccagagtaatggactgggaggttggtaaccaaggtggtctttgctttcttagttacaacagcggcacctgtgtggatggagacaactggtaccggtgcgaatgtgccccgggttttgctgggcccgactgcagaataagtaaggactgtctccgtctggttttcccaatggctttaccgcttcattccatgcctcaccccaagactttcatctttaaaaacaaagccaccattccctttaagtagctctcatagagcaaaggatctctctcctccagctgggattaagatatgccaggctggatcctcccaggtacctgctggtagttccctgggtggtgtagccctccttgttcttggggagagagtgccagtcacagaatctgatgattaatctacagtggggtcctgaagaaagtatgtgcatttccccatgactaacatgaaattatgggcaagcagatgttaaccacagctacactggtataggataaagctaatacaaacggaagggaggacgactgtggcttccagaggcttgtctgtgctgggtctgatcaggccctggagaaatgactaaaacaggaaaataggggcaggcaacgcagtttttcaagaggcttaaagcatattattttgagccttttctctacttttttacaagccctttctcttacagaacaaaaaaggtgctagagtagttatggtttgattcttgtacccaaattgtctgaaattttactggtgcttgaaatccaagtctgggattaactagtcttcagcactagatgggggcaggttgtatctgtttcatgtttctaaataaacagttggcaaactgtggcccaggggccgtatccagcccactgtctgtttttataaatacagttttcttggcacacagccacacattcatttatgtattgtctatggctactttcatgataccacaagagttggatagttgtgacagagactatataccccacaaagcctaagatgtttactgtctgaccccttccaggaaactttgccaggcttgctgtaaattgcactgtcaaaggaatcaaattaaaaattgctgcctcccaaaatggttctccactgttagaactcaggatggtggtggtctttgggagccagtgattggaggtttttgcaatagatctgtttcttcttttggatgctgcttacctgagtgaaaattcatcaagcttatgatgatatgcttttcttgtatgttatgtcaataaaaacaatctcaaaacattgccacacaccatcagtccctaaacttgaactccatttctcctagacatcaatgaatgccagtcttcaccttgtgcctttggagcgacctgtgtggatgagatcaatggctaccggtgtgtctgccctccagggcacagtggtgccaagtgccaggaaggtatgtgtgccaggcttcagctgcccatgggtcttctggggtgagcgagctttgcagtcaccatttgacttttcacaaataagccactgtgctcagggaagggaacacacagtgggactacaagggaaagggaacgtgaagagtcttccccaaaacaggtagctgttgtttttggtcagctgttgccacaaaactgtgtaccaaaccatcccaaactgctgtggcttgcagcaagcattatttttattgctcatgatatgcagcatgggcagagagattgcgctgtgggttgggttcagttcgaccagtggctgtgtctggggcatattcctttcatcgccagtgggtaggtgtgcaagaggctagtcaaaggctctgctcacatcacatctgccaatgttacattggccagagcaagtcttgtggccaagcgcagagccagcaaaggcaggaagtacacatgctgttactgtgggaagaatgatcttaacatggcaaagggcacaggcataaccatttcataacagggaccaaagaattgaaccccgatccggttcacagaaaaataaactgctcacccgtctccacctgtcagtttcagggagaccttgcatcaccatggggagtgtgataccagatggggccaaatgggatgatgactgtaatacctgccagtgcctgaatggacggatcgcctgctcaaaggtaggacatgatggctgccgcagttcacctgtgttctggaatcagggatgagcatgcctgctaagctgccagcttctgtttttctccaggtctggtgtggccctcgaccttgcctgctccacaaagggcacagcgagtgccccagcgggcagagctgcatccccatcctggacgaccagtgcttcgtccacccctgcactggtgtgggcgagtgtcggtcttccagtctccagccggtgaagacaaagtgcacctctgactcctattaccaggataactgtgcgaacatcacatttacctttaacaaggagatgatgtcaccagtatgtaacaacctttgttttttttttgaatggtggatgtctgcttgcttgctttaaaggaggaatgccatgagctaggatctacttctccctagcttacattcctgttttataataaagtaagcttgaacttagccagcctcaaagagaacatctcagccttttgttcttcctctcaatcttacacgtgtgtgggtttttaaaaatcgttttagggtcttactacggagcacatttgcagtgaattgaggaatttgaatattttgaagaatgtttccgctgaatattcaatctacatcgcttgcgagccttccccttcagcgaacaatgaaatacatgtggccattgtaagtataagacccattcacacctcattattcgatggcaaggcagttcggttaaccagtgtctgaatggagcaaattcactgacaaaaagctttgcagacacagattgtcgagtaattttgaagaaaggctgctttgagtattcctctgactctcaagtctgacaattgtttttccagtctgctgaagatatacgggatgatgggaacccgatcaaggaaatcactgacaaaataatcgatcttgttagtaaacgtgatggaaacagctcgctgattgctgccgttgcagaagtaagagttcagaggcggcctctgaagaacagaacaggtaggtgtcaagtgggactagtttgtgtgatgatagtagatgatctcattatactattcaataaagccatcaggtcgagggattatctggcagtgccctaccctcgcaggagctcccaatttaactgagaactgagggcagcctactttactaaggtcacatggcccatgggaacagaggtctgcctcatattttccttcccaacacactatgcaacgttccctgcagaacaggtattgtgctagatccgtgacaaagccctaggacactgcttgtcctttgtccttgagtttgaagctgtacaaagcctgacttggcattttggtgtcctgggacagcctagccactgctgagctctgtgaggctcgatggccccgcaggggtgtccaggcttccctcctgaggatctcgagcaccgtttcagccaagggagagattgggcatggagccatggcacgtttgagctgtctgtgctaatttgaatcggatttctagttctgaaaaccaactcctgtactgagctgcctcagtagccagacttaacaagacactgctctccccatgcgaagtcaaagagcctgtaggagctgccgctccacccagtctctccagggataagagtatcaaggtctacaggggcctgatcccagcatttgcttatcaagttgtgaagtgaccatatgcaatgatgaaaagggacttgtccctgtggcccccctcttagggataaagggcaggagaaccactgttggtattcttttgttcctgcgatgatgcttttttctttctttcttggagagttaattggttttgtgcctgccttacagatttccttgttcccttgctgagctctgtcttaactgtggcttggatctgttgcttggtgacggccttctactggtgcctgcggaagcggcggaagccgggcagccacacacactcagcctctgaggacaacaccaccaacaacgtgcgggagcagctgaaccagatcaaaaaccccattgagaaacatggggccaacacggtccccatcaaggattatgagaacaagaactccaaaatgtctaaaataaggacacacaattctgaagtagaagaggacgacatggacaaacaccagcagaaagcccggtttgccaagcagccggcgtacacgctggtagacagagaagagaagccccccaacggcacgccgacaaaacacccaaactggacaaacaaacaggacaacagagacttggaaagtgcccagagcttaaaccgaatggagtacatcgtatagcagaccgcgggcactgccgccgctaggtagagtctgagggcttgtagttctttaaactgtcgtgtcatactcgagtctgaggccgttgctgacttagaatccctgtgttaatttaagttttgacaagctggcttacactggcaatggtagtttctgtggttggctgggaaatcgagtgccgcatctcacagctatgcaaaaagctagtcaacagtaccctggttgtgtgtccccttgcagccgacacggtctcggatcaggctcccaggagcctgcccagccccctggtctttgagctcccacttctgccagatgtcctaatggtgatgcagtcttagatcatagttttatttatatttattgactcttgagttgtttttgtatattggttttatgatgacgtacaagtagttctgtatttgaaagtgcctttgcagctcagaaccacagcaacgatcacaaatgactttattatttattttttttaattgtatttttgttgttgggggaggggagactttgatgtcagcagttgctggtaaaatgaagaatttaaagaaaaaaatgtcaaaagtagaactttgtatagttatgtaaataattcttttttattaatcactgtgtatatttgatttattaacttaataatcaagagccttaaaacatcattcctttttatttatatgtatgtgtttagaattgaaggtttttgatagcattgtaagcgtatggctttatttttttgaactcttctcattacttgttgcctataagccaaaattaaggtgtttgaaaatagtttattttaaaacaataggatgggcttctgtgcccagaatactgatggaattttttttgtacgacgtcagatgtttaaaacaccttctatagcatcacttaaaacacgttttaaggactgactgaggcagtttgaggattagtttagaacaggtttttttgtttgtttgttttttgtttttctgctttagacttgaaaagagacaggcaggtgatctgctgcagagcagtaagggaacaagttgagctatgacttaacatagccaaaatgtgagtggttgaatatgattaaaaatatcaaattaattgtgtgaacttggaagcacaccaatctgactttgtaaattctgatttcttttcaccattcgtacataatactgaaccacttgtagatttgatttttttttttaatctactgcatttagggagtattctaataagctagttgaatacttgaaccataaaatgtccagtaagatcactgtttagatttgccatagagtacactgcctgccttaagtgaggaaatcaaagtgctattacgaagttcaagatcaaaaaggcttataaaacagagtaatcttgttggttcaccattgagaccgtgaagatactttgtattgtcctattagtgttatatgaacatacaaatgcatctttgatgtgttgttcttggcaataaattttgaaaagtaatatttattaaatttttttgtatgaaaacatggaacagtgtggcctcttctgagcttacgtagttctaccggctttgccatgtgcttctgccaccctgctgagtctgttctggtaatcggggtataataggctctgcctgacagagggatggaggaagaactgaaaggcttttcaaccacaaaactcatctggagttctcaaagacctggggctgctgtgaagctggaactgcgggagccccatctaggggagccttgattcccttgttattcaacagcaagtgtgaatactgcttgaataaacaccactggattaatggcct

SEQ ID NO: 123 - DNA, 5943 bp, Homo Sapiens
cagacgggctctccgggtccttctccgagagccgggcgggcacgcgtcattgtgttacctgcggccggcccgcgagctaggctggtttttttttttctcccctccctcccccctttttccatgcagctgatctaaaagggaataaaaggctgcgcataatcataataataaaagaaggggagcgcgagagaaggaaagaaagccgggaggtggaagaggagggggagcgtctcaaagaagcgatcagaataataaaaggaggccgggctctttgccttctggaacgggccgctcttgaaagggcttttgaaaagtggtgttgttttccagtcgtgcatgctccaatcggcggagtatattagagccgggacgcggcggccgcaggggcagcggcgacggcagcaccggcggcagcaccagcgcgaacagcagcggcggcgtcccgagtgcccgcggcgcgcggcgcagcgatgcgttccccacggacgcgcggccggtccgggcgccccctaagcctcctgctcgccctgctctgtgccctgcgagccaaggtgtgtggggcctcgggtcagttcgagttggagatcctgtccatgcagaacgtgaacggggagctgcagaacgggaactgctgcggcggcgcccggaacccgggagaccgcaagtgcacccgcgacgagtgtgacacatacttcaaagtgtgcctcaaggagtatcagtcccgcgtcacggccggggggccctgcagcttcggctcagggtccacgcctgtcatcgggggcaacaccttcaacctcaaggccagccgcggcaacgaccgcaaccgcatcgtgctgcctttcagtttcgcctggccgaggtcctatacgttgcttgtggaggcgtgggattccagtaatgacaccgttcaacctgacagtattattgaaaaggcttctcactcgggcatgatcaaccccagccggcagtggcagacgctgaagcagaacacgggcgttgcccactttgagtatcagatccgcgtgacctgtgatgactactactatggctttggctgcaataagttctgccgccccagagatgacttctttggacactatgcctgtgaccagaatggcaacaaaacttgcatggaaggctggatgggccccgaatgtaacagagctatttgccgacaaggctgcagtcctaagcatgggtcttgcaaactcccaggtgactgcaggtgccagtacggctggcaaggcctgtactgtgataagtgcatcccacacccgggatgcgtccacggcatctgtaatgagccctggcagtgcctctgtgagaccaactggggcggccagctctgtgacaaagatctcaattactgtgggactcatcagccgtgtctcaacgggggaacttgtagcaacacaggccctgacaaatatcagtgttcctgccctgaggggtattcaggacccaactgtgaaattgctgagcacgcctgcctctctgatccctgtcacaacagaggcagctgtaaggagacctccctgggctttgagtgtgagtgttccccaggctggaccggccccacatgctctacaaacattgatgactgttctcctaataactgttcccacgggggcacctgccaggacctggttaacggatttaagtgtgtgtgccccccacagtggactgggaaaacgtgccagttagatgcaaatgaatgtgaggccaaaccttgtgtaaacgccaaatcctgtaagaatctcattgccagctactactgcgactgtcttcccggctggatgggtcagaattgtgacataaatattaatgactgccttggccagtgtcagaatgacgcctcctgtcgggatttggttaatggttatcgctgtatctgtccacctggctatgcaggcgatcactgtgagagagacatcgatgaatgtgccagcaacccctgtttgaatgggggtcactgtcagaatgaaatcaacagattccagtgtctgtgtcccactggtttctctggaaacctctgtcagctggacatcgattattgtgagcctaatccctgccagaacggtgcccagtgctacaaccgtgccagtgactatttctgcaagtgccccgaggactatgagggcaagaactgctcacacctgaaagaccactgccgcacgaccccctgtgaagtgattgacagctgcacagtggccatggcttccaacgacacacctgaaggggtgcggtatatttcctccaacgtctgtggtcctcacgggaagtgcaagagtcagtcgggaggcaaattcacctgtgactgtaacaaaggcttcacgggaacatactgccatgaaaatattaatgactgtgagagcaacccttgtagaaacggtggcacttgcatcgatggtgtcaactcctacaagtgcatctgtagtgacggctgggagggggcctactgtgaaaccaatattaatgactgcagccagaacccctgccacaatgggggcacgtgtcgcgacctggtcaatgacttctactgtgactgtaaaaatgggtggaaaggaaagacctgccactcacgtgacagtcagtgtgatgaggccacgtgcaacaacggtggcacctgctatgatgagggggatgcttttaagtgcatgtgtcctggcggctgggaaggaacaacctgtaacatagcccgaaacagtagctgcctgcccaacccctgccataatgggggcacatgtgtggtcaacggcgagtcctttacgtgcgtctgcaaggaaggctgggaggggcccatctgtgctcagaataccaatgactgcagccctcatccctgttacaacagcggcacctgtgtggatggagacaactggtaccggtgcgaatgtgccccgggttttgctgggcccgactgcagaataaacatcaatgaatgccagtcttcaccttgtgcctttggagcgacctgtgtggatgagatcaatggctaccggtgtgtctgccctccagggcacagtggtgccaagtgccaggaagtttcagggagaccttgcatcaccatggggagtgtgataccagatggggccaaatgggatgatgactgtaatacctgccagtgcctgaatggacggatcgcctgctcaaaggtctggtgtggccctcgaccttgcctgctccacaaagggcacagcgagtgccccagcgggcagagctgcatccccatcctggacgaccagtgcttcgtccacccctgcactggtgtgggcgagtgtcggtcttccagtctccagccggtgaagacaaagtgcacctctgactcctattaccaggataactgtgcgaacatcacatttacctttaacaaggagatgatgtcaccaggtcttactacggagcacatttgcagtgaattgaggaatttgaatattttgaagaatgtttccgctgaatattcaatctacatcgcttgcgagccttccccttcagcgaacaatgaaatacatgtggccatttctgctgaagatatacgggatgatgggaacccgatcaaggaaatcactgacaaaataatcgatcttgttagtaaacgtgatggaaacagctcgctgattgctgccgttgcagaagtaagagttcagaggcggcctctgaagaacagaacagatttccttgttcccttgctgagctctgtcttaactgtggcttggatctgttgcttggtgacggccttctactggtgcctgcggaagcggcggaagccgggcagccacacacactcagcctctgaggacaacaccaccaacaacgtgcgggagcagctgaaccagatcaaaaaccccattgagaaacatggggccaacacggtccccatcaaggattatgagaacaagaactccaaaatgtctaaaataaggacacacaattctgaagtagaagaggacgacatggacaaacaccagcagaaagcccggtttgccaagcagccggcgtacacgctggtagacagagaagagaagccccccaacggcacgccgacaaaacacccaaactggacaaacaaacaggacaacagagacttggaaagtgcccagagcttaaaccgaatggagtacatcgtatagcagaccgcgggcactgccgccgctaggtagagtctgagggcttgtagttctttaaactgtcgtgtcatactcgagtctgaggccgttgctgacttagaatccctgtgttaatttaagttttgacaagctggcttacactggcaatggtagtttctgtggttggctgggaaatcgagtgccgcatctcacagctatgcaaaaagctagtcaacagtaccctggttgtgtgtccccttgcagccgacacggtctcggatcaggctcccaggagcctgcccagccccctggtctttgagctcccacttctgccagatgtcctaatggtgatgcagtcttagatcatagttttatttatatttattgactcttgagttgtttttgtatattggttttatgatgacgtacaagtagttctgtatttgaaagtgcctttgcagctcagaaccacagcaacgatcacaaatgactttattatttattttttttaattgtatttttgttgttgggggaggggagactttgatgtcagcagttgctggtaaaatgaagaatttaaagaaaaaaatgtcaaaagtagaactttgtatagttatgtaaataattcttttttattaatcactgtgtatatttgatttattaacttaataatcaagagccttaaaacatcattcctttttatttatatgtatgtgtttagaattgaaggtttttgatagcattgtaagcgtatggctttatttttttgaactcttctcattacttgttgcctataagccaaaattaaggtgtttgaaaatagtttattttaaaacaataggatgggcttctgtgcccagaatactgatggaattttttttgtacgacgtcagatgtttaaaacaccttctatagcatcacttaaaacacgttttaaggactgactgaggcagtttgaggattagtttagaacaggtttttttgtttgtttgttttttgtttttctgctttagacttgaaaagagacaggcaggtgatctgctgcagagcagtaagggaacaagttgagctatgacttaacatagccaaaatgtgagtggttgaatatgattaaaaatatcaaattaattgtgtgaacttggaagcacaccaatctgactttgtaaattctgatttcttttcaccattcgtacataatactgaaccacttgtagatttgatttttttttttaatctactgcatttagggagtattctaataagctagttgaatacttgaaccataaaatgtccagtaagatcactgtttagatttgccatagagtacactgcctgccttaagtgaggaaatcaaagtgctattacgaagttcaagatcaaaaaggcttataaaacagagtaatcttgttggttcaccattgagaccgtgaagatactttgtattgtcctattagtgttatatgaacatacaaatgcatctttgatgtgttgttcttggcaataaattttgaaaagtaatatttattaaatttttttgtatgaaaacatggaacagtgtggcctcttctgagcttacgtagttctaccggctttgccatgtgcttctgccaccctgctgagtctgttctggtaatcggggtataataggctctgcctgacagagggatggaggaagaactgaaaggcttttcaaccacaaaactcatctggagttctcaaagacctggggctgctgtgaagctggaactgcgggagccccatctaggggagccttgattcccttgttattcaacagcaagtgtgaatactgcttgaataaacaccactggattaatggcct

SEQ ID NO: 124 - protein, 1218 aa, Homo Sapiens
MRSPRTRGRSGRPLSLLLALLCALRAKVCGASGQFELEILSMQNVNGELQNGNCCGGARNPGDRKCTRDECDTYFKVCLKEYQSRVTAGGPCSFGSGSTPVIGGNTFNLKASRGNDRNRIVLPFSFAWPRSYTLLVEAWDSSNDTVQPDSIIEKASHSGMINPSRQWQTLKQNTGVAHFEYQIRVTCDDYYYGFGCNKFCRPRDDFFGHYACDQNGNKTCMEGWMGPECNRAICRQGCSPKHGSCKLPGDCRCQYGWQGLYCDKCIPHPGCVHGICNEPWQCLCETNWGGQLCDKDLNYCGTHQPCLNGGTCSNTGPDKYQCSCPEGYSGPNCEIAEHACLSDPCHNRGSCKETSLGFECECSPGWTGPTCSTNIDDCSPNNCSHGGTCQDLVNGFKCVCPPQWTGKTCQLDANECEAKPCVNAKSCKNLIASYYCDCLPGWMGQNCDININDCLGQCQNDASCRDLVNGYRCICPPGYAGDHCERDIDECASNPCLNGGHCQNEINRFQCLCPTGFSGNLCQLDIDYCEPNPCQNGAQCYNRASDYFCKCPEDYEGKNCSHLKDHCRTTPCEVIDSCTVAMASNDTPEGVRYISSNVCGPHGKCKSQSGGKFTCDCNKGFTGTYCHENINDCESNPCRNGGTCIDGVNSYKCICSDGWEGAYCETNINDCSQNPCHNGGTCRDLVNDFYCDCKNGWKGKTCHSRDSQCDEATCNNGGTCYDEGDAFKCMCPGGWEGTTCNIARNSSCLPNPCHNGGTCVVNGESFTCVCKEGWEGPICAQNTNDCSPHPCYNSGTCVDGDNWYRCECAPGFAGPDCRININECQSSPCAFGATCVDEINGYRCVCPPGHSGAKCQEVSGRPCITMGSVIPDGAKWDDDCNTCQCLNGRIACSKVWCGPRPCLLHKGHSECPSGQSCIPILDDQCFVHPCTGVGECRSSSLQPVKTKCTSDSYYQDNCANITFTFNKEMMSPGLTTEHICSELRNLNILKNVSAEYSIYIACEPSPSANNEIHVAISAEDIRDDGNPIKEITDKIIDLVSKRDGNSSLIAAVAEVRVQRRPLKNRTDFLVPLLSSVLTVAWICCLVTAFYWCLRKRRKPGSHTHSASEDNTTNNVREQLNQIKNPIEKHGANTVPIKDYENKNSKMSKIRTHNSEVEEDDMDKHQQKARFAKQPAYTLVDREEKPPNGTPTKHPNWTNKQDNRDLESAQSLNRMEYIV

SEQ ID NO: 125 - DNA, 1130575 bp, Mus Musculus
  misc_feature (32639)..(32947): n is a, c, g, or t
  misc_feature (41462)..(41584): n is a, c, g, or t
  misc_feature (58722)..(65968): n is a, c, g, or t
  misc_feature (73191)..(73210): n is a, c, g, or t
  misc_feature (143117)..(143136): n is a, c, g, or t
  misc_feature (155555)..(155574): n is a, c, g, or t
  misc_feature (172684)..(172806): n is a, c, g, or t
  misc_feature (178978)..(178997): n is a, c, g, or t
  misc_feature (180583)..(180602): n is a, c, g, or t
  misc_feature (186566)..(186585): n is a, c, g, or t
  misc_feature (228443)..(228462): n is a, c, g, or t
  misc_feature (427902)..(427921): n is a, c, g, or t
  misc_feature (429099)..(430421): n is a, c, g, or t
  misc_feature (496516)..(496535): n is a, c, g, or t
  misc_feature (499404)..(499423): n is a, c, g, or t
  misc_feature (532790)..(532809): n is a, c, g, or t
  misc_feature (542088)..(542107): n is a, c, g, or t
  misc_feature (550078)..(550097): n is a, c, g, or t
  misc_feature (597633)..(597652): n is a, c, g, or t
  misc_feature (657680)..(661020): n is a, c, g, or t
  misc_feature (675321)..(675340): n is a, c, g, or t
  misc_feature (677838)..(677857): n is a, c, g, or t
  misc_feature (680738)..(680757): n is a, c, g, or t
  misc_feature (714130)..(714522): n is a, c, g, or t
  misc_feature (727572)..(727591): n is a, c, g, or t
  misc_feature (756756)..(756872): n is a, c, g, or t
  misc_feature (795086)..(795105): n is a, c, g, or t
  misc_feature (796343)..(796362): n is a, c, g, or t
  misc_feature (797885)..(802276): n is a, c, g, or t
  misc_feature (850541)..(850620): n is a, c, g, or t
  misc_feature (863269)..(863764): n is a, c, g, or t
  misc_feature (893413)..(898035): n is a, c, g, or t
  misc_feature (929631)..(929650): n is a, c, g, or t
  misc_feature (975278)..(975297): n is a, c, g, or t
  misc_feature (991601)..(998342): n is a, c, g, or t
  misc_feature (1014252)..(1014338): n is a, c, g, or t
  misc_feature (1025792)..(1026027): n is a, c, g, or t
  misc_feature (1030960)..(1031139): n is a, c, g, or t
  misc_feature (1075508)..(1085037): n is a, c, g, or t
  misc_feature (1095653)..(1095672): n is a, c, g, or t
ttggcgcgctcgccctctgcctgctccggctcctgctcctggggctgcagcggccgccgttgcccggcgccggagcgcagagcgccgcaggtgagtgcgcccgccgggctccccgggccccttcgctctccccagccctgggaggagaaagttgggtcccgtggccaggggatgccggggcccggtgggagtcccgtcccaacctccggacgcagctgctgtgtccaggcgtgcccagtcccgctccaggtccccccctggcccctcgtcgccttactttcctgccgcttcccccccacccccgggcgggagtaactttgcgcggctgttgcgaatatttccacttgctgcctcccacttgtcggaacctgtcactcgagtgtttcggggtggagggaggaggcgccgcttctcgcccggcgcggagcactgtcacccgggcagcttcctgggctgcgcgctcttggagtggggagcacaggtccctagcaggcccaggctgccagggcggtggcttttcctttctcctgggagacactgaagatcatccagtgttgttctaaacacgccgctccccttagcgagcccttagcagctgggacttcccatgggagtgttcttgtgaatgacccactcggctaaaccctcacctcacctcgtggctctgtccagagtaatgggtaccctgctaaggccctttaagtgcagtggctttgatcagtgagctagtgggcttctgaaaacttcgggacactcgtctttcggcttgcccatgggcaggtagctagttccccagagtgtgtctagtgtcttcttagtggcgactgagctgaagagaccactaccgagggtctctctcatcactaaaaccccactggtagggcttccttccgtgagtcccttaaagagggaaggagaggtggggagggatacctccaagttcaaaatcacctcgaagtttcttagcacctttggtttaggagtgaccacactgagctgctgtcgctggtcggggtcgggggcgggggggcacgttgaggcatgtcagcggaacttaggaaagggttctttttggattgctaagcaacagctgtgctcacataagaaatcaggggaggaagaaagggaaagaaaggcagtgagcctgatggaagtctctaaacaggctgcttttgagaggaagaaccgccggagtgacattccgttagaaatgtcttaggttttcttccctgacttgatgttaaaatggaaactggacacaggatgtatgggaaggaacagcttgttttcgtgccagcgaagttgagcaaggaggccactctttttgaggtgtctgaagctgaaaggctgggacaagagggggagaaaagagacggccgcaacatcattctgaagatgcttcaaggctcttgtttccctcgctttggggtctgcgttaggtgtgctgtgtcaggaagctggcaggagggtgcttgaggcagtcctggggacccgggtatgacttatgattctaatctttactgtcttctaaggcttggcgggacattcatacgttaatagtactcacgttcccgcagcagaaaccggatcaaacacgtcccacagaccttttttgggtagcagctgtaaacccagaacctgctccagaaagctgtccagggctgaaacgcacgccggttccgcatgttaccgcaaggtggcgctcgctcacagctgttaaatgcaaatcgagccgctttcatctcagggatagaacttcggttcaatttttaaatgagtaatgtgtttattcagcagccttttgttaaaacatttagagaagtgtgaggaggaagcaccttttctttgtttgctgctcggaacacaccgggaagaaaagcaatcctggagtacagtttgggaagaaatcgactgcgaaggcgccatatgtttcctttggttctacctgggcccatagcttttgcaaagctacaatagcatatatttagcaagcggctgcgttgttcccggctccttaaaggagtaggattagcttgtcttggtgacttggtgcgttctaagctccgctcatttatagaaatgggcatcttttttttttctatacctagctcattatcgctctactttaatgctaactagatcgtttaaactggattcttccggggctttccttatgaacatctgtaattgtcgacgcgttaatcctgcaactgttgacttgttaaaacggacttctcttcttattttattcctcattgtggtattgtcagaatccaaatttgttataagtatgattatagtttgggtctcttttgaaaaagcttattttaaactttctgcaagtctgagtaaataatgcattttaaaactcagtagtgtgttctccatattcctttgatctgaagattccccggtctcggaagcaatttcaatttgtgagcttacatctaggacattgagggctgatgggctttgctgtgactgttggtcacagtgtccaaaagtcggagtcagaagctgtcatcaaaggcaatttccccctaccttactctaccctgtgtttcatgagccactacattttttttttttttggcgagggattatagtaaaagaaaaaaagtgctttgataatagttggtaaacagaacacatgatttgggaatgagggaaggctatggctacgtaattagatacgggataattagtctatttatcagtgggtttcagtattacaagttaaagccaaatcttgacagggaccgactctgggtggcagttgtaagcaatgtagtcatttaactcaataattgctgccagatacctctggggagctgttcccactacagttgcattttactttctgtcctggattgcttgatttgtttcctaataacagaacaattaatgtggagacctggctttgattctgttccagcaacaacaacaaacatgaaataaatagagacctccgtcttgggttacagtctgtacctttctcttctgtttcagttccttcttgtttatcctaagcacatttccacaggcttcaggctgccagcagagatggcttctcttgtagtgttataactgtcaccttacagagccatgatcagaggatattacagcatcgttctcttaagcacgggatactcccatgactctctgactgcgtgttgctgtggaaacaagagcattgctatgtaggcagtggtccttgataaatatttatcgatggtgatgaagagatggtggagcctcacagtaaccaggatggggaaggagtatcgtgtttgggaggcagcgtggcttggagaaaagcactggagctcaatgttcttggtttgaatctcacctctgcctttggtactggctgtgccacattggacaggctgtttatcttctccaacctcaagctcttatctgcaaagtgaggataattagagctgcctcactgaattttgtgaggactaaagcagaagatgcatggggggggggtactctgtccagagtgggagccaactgttactctccttggcatggctctgtgctcctgcgtgtatccgagctggggccgtggtgctcctgccaagctaagtgaagcactaagcaggagacggctggactttcatgatgctttttagttttccatcctttattcattttttggggggggggagtgggtcttgattccctgatactatttttagaaagaaatttcaaatgaaaagtcccagcaagtgacagtagtcagtttagttgtcccagaatttgtggaaagaatgttttaactgcactttgacctttgaactggcacagatttaaaaaggtcatcagggtaaaatctttggggcttatcactgtttcctcttttttgcatacgctcctcctttctggtcaggctctgtccccacctctgctcctgcctcttatgaaccccagaaataaagtgtgcgctgcacctatgaagttgataaataagcaaagactaagaccaaggtatagcaggctatggtattccaaggaacaaatttaaaacgctatgagaacaagctgtgtccaacaggtgtgatgggtttaggagccggcaccacgaggctaggaaaagtcagttatgatgttttatggcatcttagaaaatggattcaaatggagtgagagaggaaggaagccacagggtttaattgttaaatcagatgtagttaaagggacagtggtaatcagttcagatgaaccaggatactaccccccctcccacccccacccccgcccaccgacccccactgggcctgttgaaagtgaatctcaatacaggaatgagaggcagagagatggagggacaacatgtgaatggcaaatggtgacacttagggcctctatggtccccagatctcagtgtgattcacttggcatttcctatgtacacaccaggagggctactcagaagcccagtgggatccgtattcagtaagtcactaagaaacataccaagtctgcagggtggtagacccacactggagtgttgaatgaagtacgcgtctcactcatacatccaacctctgcacaccagtggagtgtgcataggaccctttgtggtttttgaatattcatattaaaatttttattgggtgccggagggactaaaaagcagcaaaaagcatttttggtgattagtttgtcaatttctttaaaacgggaaacctgcatctgccataggacgacgccctcatgcttttaggaacctgcctggcagaaattaacacacaagtccagaggaagatgggagcatgaatgctcgaagaagtattatttggagtcgccccaaatggaaaggaacccacgtatccatccgattggatattgctgctaataaaagagaatgaatttcggatatctgctaagacatatatcaagaatcagatgctaagttaaagcggctagatgcttttcatagtgtatgggggactcagaaaaggcaaacctatggagaacattggcttcccaggctgggcacgggcaggggttctcagcaagctggtgtgagatcgcttttttgagacgatggaattgcttgaccgctgggaaggaggcgatcctgattggttaactccaggaatcggcaggacatgctagaaggatatacttagagtgggtggaatgttgtggaattaaatctttaaactgtttacttcaatgtgagcttccaaatgaagtatgtggtatgatcttgatgaagcatttctctgcttccacatctgtaaagcaggaataccaccaggcatccaaggagagtgtcttatctcgctccagtttccaaaatacttacatgggatacttgcaaggcctgtaggtttttagtctctttaatctgtgaattaaatctctaaactagttgcctccttactcattgctttggcaatagttaaaataaaatttaaggctatgaagttttggcaaagaactcgagtaattagatggctctatgcatttttgaggttgaaagcaggctctttgaatactgctagcagaatattgacttccaggcagctaggatgagagtcttaaagcccacacccacagtgacacacctactctaacaaggccacacctactccaacagggccacaccttctaatcatgccactccctgggctgggcatatataagtcacgatagcaaggatgtggcagtttagcagaagcatcttatgcttcccagataaacacaggtgtagtgctttttggccctgggtttccagccaagataaatagctgcacagttgaggaaaaaaaaaaaaaaagctctgtattggttttctgtctatcttttttaggggcttccatcaactctctggaatagtgtgtgtgtgtgtgtgtgtgtgtgtgtgtgtgtgtgtatgtaatatgtgcatacatgttttaggcatcaaacccaggtcttgcacattgctaggcaagtgctgcaccaatgaactatattcccagcccctggctttggatgtaggctcttgctctgtggttccccatgtaccaccatgtctgactttcatgctgatcttaaaccagtgttacccatcttgatctttttttttttttgccatcttgtaccttgtgctcagacaggattcagagctcatgtccctctgtccctgagctcctgcttcatggcatcctctcagcctgcttctcagaatgccccagacaccactgtatccccttttgtctcttgggtctggaaatggtcatgaaaacagaatctgtttttgtgagtcatcccccttgcccggcaggtggtcatgttttcatctcaaaatggcagttcagctgtctccttgttattgagtaaagatgaatgaaagaatgagtgactgcataggcaaactcatatcagcaggcataaaaaatgttttaaaagtacctgctatcggatggtcttgacttcctcaagtattaatgacttgtttctgctcgcgtgatcacaatttgggctgtgaatctcctccacaccacatcctttctcactatctttgagagttcttatttatttatttttgacagtaggctggatcttaggttaaccactaggtattctgactcaaacatacatctgggtgatattttaagagtcctggggacatcaacacatgaggtgtccatttgtgcttttgtttgaacattaacctagaacgggataaaacagaggcatctggtaatgttagggatggaaacgaaatctaaacagcagagacccacaatcatttagctcttgggtttaataaagttggttcgaatgtgagaacttattaatctaattaaaatgtttgtcacattgtcacactttgcgcttaaattagtacagcctagaaactgatgttacagtttctcttctccttaggcatttaggaagtggtccctccatgcatgcaagctccgtgctggggacccctgccagggttcactgggtgccaacttttaggaaaaagagaagggcgaaaaattttaagtctcaccttaaaaaggaaccactccccccccccccccccttctgttgtgcccttctgctgtctcaggatttctttgtagcaggaagcttagctgagtcctctggtctgagcctctcactggattcagtcaaggtgtttgtgagagcttccaggattgtgctgaggccctgctcttttgctttcccatgaggtagctgtgggattcagctcttccctgggacctcaggctgccctccattccttcacacatgggcccttctcagcgtggggcagcccacagctcagcagagtgagtgaagagggcagtgagccttttgtaacctgatttcgaaagtgacatcccattgcttttaccgtgctccctttggaagaggcaagaaactaaagaaccaatagaatgtactagaagatatatatatatttttttctatatatttatttacatatattcatcatgttatatttatcaacattatcaattatatagccattttatataaaatttctaaaaattagttgttccattatactgtattaaaattgtatcaatattaacaaaaatgatacttcacatattacaattatgctattactatacattacactagtatcctatgtatacatatacaaatgttatatttggagatttatcataggaattgactatcatagttatggaggctggcaggtgtcataatttgccatcttcaagctggataccaggaaatgtctcaagaggaatgtctttagacaccttgaatgtaccctttatgtgtctcaggaattgactggctggccttcccaattttgatgctgcaattttagagcagtttctcattgctttcctgttttcttcagccctgctaaatctggctgtgcatggtgtgtgtatgtgtatatatatatatatatatatatatatatatatgtatgtaaatatatatgtatacatatacatatatatatacacatacacacatatatgtaatatatgtgtgtgtgtatgcatacatatgtatgcaatatatatgcaatgtatacaatatatatgtgtgtgtgtgtgtatgcatgtggtaggtgaggagcatgatggcttccgtggagtctagatcagggatggtgcatgtggctacacgaagcctgtgccgctgtacttgccatgcctgggtcacgggtgctgctctgctctgctctgcagcatcagtgttgagtgtcgccctttccccatctgcacatgtcaagctctgaccgtcttagcagttgtgaatttattcacttgcgcctttcttctggttgatgaccacttgctatctcttcaagtccacctgttgcgatagggagtgtgggaatgggactgtggcgaagacatcaagccaggactctaaactgtctcgggcagaagtgggttggggctgggggggatgactggttatttattttctcaaagcttcaaagccctcaagaagccaggtgtgctgccagctgccaccacgtacccctgctggctctgcttcaaggcggttctcgtcccctaaacagaactgtgtggaacgaagcagaggccacctctctagtgctttgattgcactgtcttgaggccactttaactaggtttactcaggaactatggaacctgcaggatgtgaggggtcttatagcttttaactgttgagatgtgcatcgtaaccatgcaaaaccccttaactgcggcacctaactatggaaccaccctttgcttctgatagacttgccaacgggacgtttgtattttctccccagaaggtgcctattccaagtggtaaagtgtatttctgggccttttccatcccgtttttggtagacaagagcaactcagttgagccaattatagaatgtcagggtcaccgctacctataaaaactgtacatatattttaagatgttcattagttaaaactatatcctgagtcattttttaaagtgaagtagatggatttaagtttcttatctttattgcctttacctttccctgtatgaaaaacaattatccaataattaaattcctttgtgtataatcaccatattgcttttgctgacgcatttctcagttctgttcctggtttcttgcactttgataaccttaacagctaccatttatcccaggagcagcactggctacctgctccttcagggactctagggtcccacttacctccgccggccaaggcttcctttccttatgttgatccaggagcatccttttaggacccagaggttttgggctccaacctcagacatctctttttttgctcttttggatccttcctcctacctcttactttatctcacatagaagagtctacggattttgccttaggctcattgccttgggctcagacattttttttttttttttaatgttagtcccagcagttaagtggaggacagcagatacatttcatgaggctcagcttcttctaggacatttctcatgtttcagacatgcttgacccattgttgcctgctttaacattgtggttatccatggacatctggccaatgccatgagcctcttgttgtcatcccattacagaggccagtgacatggtttcagagcagtatggccaactctgtgttgcttgatttattaagtctccaaacataatttcctaaaagtaaggtgctcatgcaagcggagacatttgaagcctaccttgggctggccttctctggcctcagacttcactgttataatgtgtagctatgtgagacatcaacaccaggccagtcttgcttctttcctacctgcagcccatgtattgtgatgccattgtcttttacagtggcatcatggatgatcttaatgtcaatgaaccgagcatttacttaaggaatgttatagacaatagactcttcagtttatggactaaactcagtatctacaaggacatatcctctcctgtgggcagaaaacagaactgatcttatgggtgtaataatcagataagtagcaaccattgaagagtatcaaaataatcgaggtgttagcagcaggtgggtggtattaccccttggaagagacatgggagaaatggaagtggaatgctaactaagggcatcttggctttgtgtataatactctatttctttctgataaggggaatatattcaaaatagatttgttaaagacaagtcaatactttttgatagggaagaagacaggtgtcaatggcacctttctctataatagttctagactgaaattagtctctcaggaggagatactgggggcagctggttggagagatggctcaggggctaagtggaacctccggtttggttcccccaagcccacacggtgcagctgacaacctcctgtaacttcagtttcagggatctgatgccctcttctgacctccaaggacattaccacacacatgcgcatattaacacacaggcacacatatttatgggacatcaccatgcacatgcgcatattaacacacaggcacacatatttgtgcagggatagaaataaatcttaaatgatgcctgtggagtttaaaattgttaatgaagtgcagttgataaggacttagaatgcatatactattttccccgcttgtcttttcaaaaatcaattctgaaatttttttcctctatgtggaaagcctcattttagggtgctaatgatgatttctcagggggactcaggttggctggatccactcaggagatagggagaggctgttgctgacacgggcatagttgagtaggagcttatgagggtctacggaggggcttgtgatgtggtgtaacagctgccctcctcctgcacctatctttctcccgggacttccatggaacagatgttacctcttagacacaacagatggaacagcctttggctctgggtcatacgggccctaataaggccttttgacttacgtccttggtgtttgagggtgctataaatctgggcagcttttgtatctgtcgataacctgctgacttctatgtttgtttgcttgtttgtttgtttttctgttctggtgtgtggctctgtgtgggtgagcacacatgtggaagccggtggtcaatgttgagcgtcttcctaagttgccttccagcttatttactgagacaggggttcaccttgaacctgagttttacagatttagctagactagctgaccagggagcttccggggttttcatgtccctacccaaaccccatcggtgtttgttttctctctgtgtgaatggttttgcttgtatggatgtgtgtgtaccccttttgtgcagtgcctgtgaagaccagaagagggtattggagcccctgaaactagagctacaaatggttgagagcctccacattgaaggctgggaccccaggctggttcctctggaagagcatcagtgttcttccatgttcttccatctctccagcccctcaacttccatgtatttaaaggctggagttgtatatctctgactagggtttagagaaaaagcttattttcatgaaactcaaatcacttaaggtctttggtagaggttaagcatatatatatatatatatatatatatatatatatatatatatatatatatatatttaaaaatatctgcctttgttctattgaactattttattatttgacagtatccattcccccccacccccaacgaggatgaattgtgaagtcccagaaccaggatatgaaacagcttttccagggctgctcatttctagctgtatgtccttcaaaacagtctagattaggatgtgacaggaggggtcctgactctcttggaacgaagactggtaaccacccgaggtatacagaggagaagaacagttggcgtctgttggaacggaaagtagaaaatacaagatgtcaaagcatttggtgaaatgatggatgacagagggataataatagggaccagcctcaaaagttgtgaaaaacacaggtgcactgggtgtctcagagcaggaaggattcaaagtgagcatccccagaatgaatgcatgaggaaaatgactgccagacaggaggactgacgcccttgcatacttcaggtacttaaaataagccaggcagttgtcaagagctatgctaattgtcactcacccagtctccttaacagtcttaggatgcgggcacacttaagaaccaaatttaagaacatagccattaagactgagcctgaggtcacacagctagcaagtggtttcgtcaggatttgagcccaagtgactcaaggctggaatatctaatcttagctatcaatttatgttccctttttctcatttactttacacgcccactgtgtgaatttcatccttaggggagaaattaggtctacttgaaattcctggatagaaactctgcctttagaaacttccatgggaacattgttgggaagagatttaggatgccatttacatcttataattccatctagaagacatggtattcccatatatcatggaagacatttgatttcatggagattcaagggttgggacataaatcggctcatgctaatgtctaggttcttagtcaccacgtggtacagaatgttaggagctgtttttatggcagtaagaagtatgggagagaggatgttgtctgtgcaggaagccctgtttctcacaagagactcatcttttctagtctcttcttcttgttaaagatctacttatttattttttatgtacatgagtactctgttttcatggtcatcagatgagggcttcagatcccattatagatggttatgagccattatgtggtagctgggaatggaactcaggtgctctggaagagcagccaatggtcttaaccactgagccactagagaagattttgtggagagattccctcataccctgagtcagattttgttttactaggttctattagagggtcctgtgactgagggcagctgtgcccccaaaccctaggctatggtctttggtcctctgtggctctagcagattcagtagtctagaagaatctttagcttggggaggagattcctctttcaattcaacaagtttgaagttgatgctcataccattgggtggggttacctttgagtttagatgtatctagtgttgagtgttgcagatttttttttttttctgtaagtctctaaattttgagatgagaggcctggagaatttttttctttaatttttctaaagatacctaatctctttcctaccttcttactcttgtggtgtgagactggcaataaagaataggcagattccctcccagctcagtgtcagctccatgaacacagggttaaggcatgacccttcttggctttgggatgagtcttctttgtggaatcgggtcatttacagatgatccatctgttttcttaagaagaaatgtataggtgcgtaaggagtgggctcagcttggatatctgactgtaggctccagaaaatgtttgtctcaagcatacattatgaccttgatggagtcctctgaagacctccgtctggtcatctgttgagatgatgctaatggtgatgtcctgacagttgtggtggtgacagatcactgcggtgttacaggcagagtctcaggaaagggccaggctcatggcaagtgctcagtaaatgctcttgttgatattaggagttctgggaactcaccagagccctgccctgttagtgcctgaaagcacaagaagaaccttactgggctgaccagcagtttccatttgtcttagttccttttctattcctgtgacaacatcatgaccaaggcaacttataaaagaaagcatctaatttggggctcacagtctttctagtgagtccatggccattgtggcagagagcaggccagcaggccagtaggcaaacaggcatgaagctgcagcacccactgagagcttagaccttaaccaaatgttaatggagagagagagggagggagagagagggagggagggagggagggagggagagagagagagagagagagagaaagagagagagagagagaagaagaagaagaagaagaagaagaagaagaagaagaagaagaagaagaagaagaagaagaagaagaggaaagaaggaagaagaagaagaggaggaaagaaggaagaagaagaagaggaggaaagaaggaagaagaagaagaagaggaggaaagaaggaagaagaagaagaggaggaaagaaggaagaagaagaaggagggggaggaggaggaggaaaaagaaggaggatgaagaaggaggaagaaggaagaaggaagaaggaggaaggagaaagaaagaaagaaagaaagaaagaaagaaagaaagaagaaagaaagaaagaaagacgaaccaggaatagcatgggtttttgaaaccacaaagcccacctttgataacacacctcctccaggaaggccacacctcctccttattgccaaatacttccacttactgaggactaaacattcaaatatatgagcatatttgggggcagggtgtgcttgttcaaaccactacactatttgcccagaatggtggtatttcccaagatatagcttaccctacagacccagaaattttctaattttttttttaatagacaactaaggtccattgtgtctttggcactttggaaatgcttggcttatttatcttggtgtatttttgttgttgatgatgatgatgatgataatgtttgtttgtaattatttttactagaagttctgttccatgagggttgggtttctgtcctagtcagggatgatttcttgtgctgtccgtagttctatacacagtgtgagcttactgtgggtgaatgagtcatgatctcaaacttcagctgaagatggtatgttctgtcttttatagtagaagttggtttagcttacagctactaagaaatatctttaccagtgtttctgataatagttgatttagagtaagaatgcctgtggcaccccgatgtgtaccagaaaccacggtgcaatgttcctgtgtcacccactgtcccatttactcttcagggagtccctaacaaagtgcactcaacattcctgagggtatgtggcctactctgccagatagatgaccgttcactggccaagcctgggcttcagcctagcttgcatctatttccagggcagcgtccttttcatttcaacactgcgcaagattcaaaggagttttctgtattgtaaagatcaagtgcgtcgtaaaggaatagtttgaccttaaatatattttatctaaggtcacccaggatgctggacgtgaaatagacaatggagtaggggaaagcagaactaagtctcggctctgtgttctctggcaagttactgtgccttgtggaaccttggtttaccacgtgccagtgattctaccagctggcagggcattggtaaggtttgtggtgatgtatataagatcattggcattgggcagcagctatggtggttatgttatcttatagaaaattggtaattaatgcccaagctgtatgatgaacctcaatttcatgtgtggatctgaaattccactcttcactgttctttgctaggaagacttgctagagctggacctcacaagaaactggaaacattttaatccccatctggactggaatgcttaacacctgtctttctctctctttgtccttggggaaaaaattatccttttttctgagaccttcatttctccatcagagaaatgggaataattgtgcttctcctattggatgagtgtgagccgaaagcaaagacgtcaaagagtgaatggacagtgtagaaatggtgctcatgctaagtgcgacttttctctgcctgtcagataaagacctgtttcactacggaccttctaaatattggcattcagatatgtgtctaaattggtaggcaccgggcccggttctttttgggaatggtaagtggttaccagataacctttcaaatctcctttcttactttatccagagtcctgctgtttaagaggcttgccttccctcgcaccacgcagagcccagaaaatggtcaaagtgatgctaggcacacacaggcatctcgtctcctctccaagggagagccccagacccttcccgagtggctgaagttctatgaaaacttttaacaagtttttatctgattccatgagctcagagggtttaaaaggaggacggcctgctgttctggggaaacaggcttgccagggaggtaaataaaaggaacaacagcctgattgttagagaggaggaaggaaactgaaagacacagcagtgaagtcttaataaactcagtagccggagctgctggctctgtgggcagggattgctgtgtccctcgagcccccgagcccccaccttattgctttgctgaagatctactggcagtcatgaccattatgatgtcaggtgaagaaaacaggtgtgagattttaaacgctaactcatttttttcctaaccttggcttattgttttatctaattcccacaattctctcttagagtgcttcacttttaggcggttcatctcctgcagatcttacttttcacaatggctgataagtcttaagggacaggccaacccaaagccatatgggagatgagagttggggaaagagtctaaacctgtggtttagacatttatcctggggtgcacactatgatctccttgtgtcctggaagagggcagggtgtgtggctcagttttaatggctttcctccacagactgagtatctcctgtttggagtgatgctttccaactagtgacccgggctccaagtgtttggagaggtaagtgatttcaaggagggtgtgtagcttttcggatggttctgttgtcaatgtaagtcattcatgggaatagcttgactggggcttatgatgagcaagtaggaatggaagagaatgcacaagggagcattggggcaagaggagaatctgggtggcgtccagtacttggttaagagggctgggcccttgctctctacagaacttgtctgtgtcacctggtaactgtttccacgaacaacaatgctttttctcccttatctttggcttttaattttttttcttgaactatctcatcaggggagtaagtttatactttgggatctcagttttgaaatagcatttattttccatgtgaagtgcacataaacaattcctgatgtctggatagcaaacaatgaggatgtaacagctgagggaccccctcctagagtgacatcacagtgacaccaaaagtctgtgacagcaaggatcacaaaattgggattgaaatggtctggggaagcctcagtgccaagctatttaactgcaccctggttgtgtggcaaatcaggccaggctctgacatgacctcagcctcccaacttaagagatgtctgtgaaacagtttgacgtttctctttgtcatttgcttcaaagggaaagacttggcagctgatgcttttagcaagaaagtgctacagattggcttaatgtagagattcttttgatgaagtcaatctccaatatatttcaaatgtgcaaagtttttttttttgagaattttatacttataatatgtttggatcaagtccactctattttctcctttctaattttctctcatcccccaaactacctttccctccagaccttatgtcatctcttcttgttttggtttcttatctttttttcttttcttttttttttttttttgtaaatccagtgaatcctctcagtgctgcctgaatggggtgggtatggggccatcttctggagtataagtgacctcttggcagctgtattctttcctctctcagcagccatcagttttcagcagcttttcagctagggaagggataccatgaacccctaccctgcctgtgctgggattttggctggtttgatcttgtgcgggtctcatgcatttagtcacagctgctgtcaactgatgtgcacaagagccctgtgctgcacagcaaatgatctttctttcttttgcaaggtttcctgcagcccaggatgaccttgatcttcctacataactgagagtgaccttgaactcctggagctcctgcctgcatgtctgagtgctgagattatacataagagccactgcagtgggtttatatgatgctagggattatgtccagggcttgatgagtgctagacaaggactctatcaactgtgctgcatctccagccttctaagtgtgtgcaagcattggacggcacagtaagaggtatagaaagttgacatcatgacttttagatcggatgacttgacaaatccaaattgaaacgacagttgcgactctgtattcattaactgtccctgcatatcaaagtctgcaaaattagccacttattgcacatttatcatcatctctcaactctgagagccagtgatctgagaataacttacctgggtcttttgctttttggtctcacaaggtttcattcaaggtagcagccagggctgtgagctcatcagaagatgcactgggaaggaactgttttcatgcttggagagttgatggctacactaatttcttttgcaggtttctggattgagacctttggctccttggggctgttatctagaagtcatccttagtttcttgccacagtgatcactccatcatagtactggctttaaacccccactctgaagtactagaaaagacacttcatcacctttaccgtgttctgcttgttaaaaggtagttcttagtccatcccccacttaggcaaagggtagtagacatattgtgagtgatctgaggtaattatctggggccttcttggagccttccttttgtagactcacatctcaaaatttccttctagcagcctttagatccttgctacaaaaatgtcgcttctttagagacaagaaagattgaaatttaaccagaaaactgaaacggggatggattatcctgacatacttgctgaagttacttaggtatcttacaaaagctttgaaatatgtgacttcctctctgcatcacaataacctggaagtagacagcgtttcttagcacagaggaaggattcagaaacaagcctgagtctgctctggtcttacaatgtcaaaagctgttgggcttttaaagacatcaacaggcattgagagtaaagtttttgttggtgcgactgacatggtggcccttcctgtctgctgggacaggggttcgctgtggctaggaccacccatctaatctgcatatcaagatgtcaaggcatagcataggagggtacaaaggtcaagctaggttgcagggtgggtgtcggaggcagggcaggaaggagttagctaagagctgagtctttttttcctctcatacagggaagaattgtgagaactgtccattatccattcatgtctcccctgctgcgttgaatttggactttacaaaaccaatcaaagccattgtgcactaacgtctaccaactacaaggatggttgtcctcccccaaccccatctctgctttgtctgcagagctgtgattggaaccctttcagttttctcttatgggataaaaatgagtcgaaatgtagacgtgaaggtacagatactggcagtgatatgtctgaggcaaagatggagcctgtcagacgtacagaaagtgttgactgtttggctgtgatcggttgctggtcagatggcttcagttgtgaagagaaatgaaatgaaatgctggaaaaatgtatcttccaaacaccatcttcccaaggccaagtttagcgatagagggcccaggaatcagcattgggcacaaagaaaaaccttcactgagtcagacttagagaaatcaacagatagatccatagagtgtcctagaggaggagggcttgcttgctccagacacctccagacactccggacactgttctgttccctgctggcagattgcaaaggaggttgatgagaccaacagaactgccatgcaactgcaatgcaagttttgacagcataaatcagatcgagccttcccttatttcaagttgttctgctctgtacactccaagtgcagcccaaactgctgcctcctgcctcttagagccagctcctggcaaggtctcccaactccgcttctgccattcacttatttggttgagtttaacccaggggacagcagcctgcatcccagggcctattgctcattttttttttattacattagaatagtgtttctattttcgggggttatgaagattatatgaactttgaatttcaatgtctgtaaaacaaaacaaaaccacattggaacattacagtgcattgccatttgcttccatatcatctgtggctgctttcatgctagggccgtggaactgagtatctgcaatgaaaaccaaatggcctgcaaagttcaagtgactataacctggctgctcatagagaagggccactggcccctgctctgatgctctgaccacagcgggcgtcttatctttttctttcagggctgtgacctcagcttttactcactctgttttctgtctatgcagactgcgtcttcattttagatctattattgcttttacatgcgagtgtgtgtgtgtgtgtgtgtgtgtgtgtgtgtttgccacacatgcaggtgcccacagaggctagaagagggtgttggatccacttaatccagtttcaggaggttgtgagctgctcatcttgggtgctgagaaccagactcaggtcctgtggaggaacagtaccagtggacccatctctgcagagccgcctccccagaccttcctcttattcctcctctgtaatttctactcaggtaggtttcctttgtttgctgtttccattttcaggcaatgtccattggttaggactacagcttagctcgatgtctttcttttcttactggattgtttatcccatccaaaagtaaaatagataaaacttccttttgtgattgctgtctagaaagtatctgcctgtcaccatgcagagatggtaggcttaaattgctgctgctttgttgtgtgtgtgtgtgtgtttgtgtggcagtgtacttgcctctagtcaggcatgtttctggaagccctgacatttggcagcatctagtgggccatcatgaaaagccctttgctgtagtaggaatcatacaggctgtatttgtgtgatggtaggggaggagtagaacagagcagccccagatgggaatcccaaaggcacacatccttgctgcttctagagtgagggagcatggaaaatggctgtgcacatctgcccatgcagaaagtcaaggtcatactttccagggttggtgagattgcgttgagacattgtataactttagtgactcagcctgggacaacacatgacagcttttgcctctgcaggagcccatggctgctctaagtcttttgctcatgatcaggggatggtggataggaagagaacaagagatttggagtcagatgctggccctgtcactagtggattcctggcttgtgccttgatttccttatatgtcaaaggggtataatgacaagagccacttcaaaaaactgacatggggattaagagaggcagtgcctaggtgaagcagagagcatgcatccggtgccagatctgccaccaccatcattatctaagacattgtcctctcatgtccacaactgatgtcgtaggaaagtttctactgacttcaaatgtcatctgtggagtaaacctaagagtctcagtatatgtttctgttttgtcttgtttttatcaaacattgctcccctctctccccacgtgacagcatggttacttaattacatctcccagcttcctgccctccagtttccaaagcaggagtagccatattatcatggtaatgtggcagtaataacctaccacgtctgtgtaaataagaaacatctgtgcaatatttatgacccataaaacatagctacactctaaaatgttgttctaatcccaagtaggtcattgtgatggagccgtgatctgaggaccctcctggggcctcctgctcagcttgccggggtctgtgccagccgcccagatgggactgggcagtgccacatggcagttggcaagaggcaggctcctgagggggattttatgtccatcagagcaaaaaatgagttgcctttttacaggaaaaatggggtaaaggtgcttttgaaatcaagagcagccagcttttggttgtgggcagggttgggatctctgggcatggtgtagagggtgtggaagcttggcatcgtgtcctgacaccatgaacatttggttcgtcctgcctgtggtgaacttttgcaaaagcatccagaagactcaggatccggactgtggcccaatcttagtaattgtgcgtggagccacagtgggtgattctgaaatacctgtcatactcattggtcttaattctctctctggtttccctactggtcttctcagtgggtcctgtgcttctataagctaacttataattcctttgtgtgtttcttcatgtttatgaaggtatgtatatatgcctatgtgcttgtgtgtgtgtgcttgtgtgaatctgtgtatgtgtgaaagtgtgtgtgtgtgtgtgtgtatgtgtgcgtgcctgtgtgtgtgtgtgtgtgtgtgtgtgtgtgtgtgtgtgtgtgtgcacatgaggctagagattgatgtcaggagtcttcctcagttcctctccatgttaatttttgagccagggtttcccactgaaccaggagctcaccacttgcctaggctgactagctaaggaactgtagtgattcacctgtctcttctgccccagtgctgagggacttgtactaccatgtccggctattatataggtcttggagattcaaattctagtccttgtgctcatatagcaagcaattttcccgattaaaccattgccccagaccccagacccagcattttcatgtgggtctttgagcttgcatggcaagcactctcctgactgagtcagctttccatgcctaacttagaaattatttaatgaactcaaaatctcctcctctttcatgctgcttgatatgtccttaaagtccacaaactcatttgcaagtctggctaagaaaaacattggtagaaagagatttaatatgtgcctctattaagttctgtgttctgtgaacagcatgtcacaggactcagcaaaaaaatatttccatcaagggtcagattagtagccacagaaagaagtgtaaacaaagggacttggctgcatttcaataaaatcctataaagtgggaagctggccagaggcccatgtttctttgtttggctctatctgttggtggtaggacatacagcgatagataaactggtcctgggtaatggtgcatacctgtatccccactgcttgggagtatggggctggatggccagaagtttgaggcaagcatgggtggtagagtgaagtcctgtcttagaagacaggggagtaggaggaagagatacagaaggaacaggcagagaggaggaagaggagggaagagagcagataaattggtcatcaagtgtcctccttggtgagttgtcattacaaagtgaccttcccatagacctcacactagggctgtgaagcagaactggaccaatgtttttataagtaaaaaggtatgtgtgtgtgtgtgtgtgtgtgtgtgatgtctgtgataaacatatatgtgttggtcagaggacaacttgtgagagtcagtcctctccctctaccttatggattctggagatcaagctctgttcctcagacttggtggcaagcgtttttacccacgaggccatctcactgaacactagacctatgtctacaggttttataaagcactgtcacatgttacctctccttacagccccaaaggaagcactctcctgtttcctaaacggagggggatcttgggttacattaagtcccgtataaggaaacactagactttccccctttaatcttattctcatggggtggacatgacgggtggccagtgtgggcttacctgtggattggatttgtactgcagtcagatggttgatgtcttttgtgcttcactcatttacagggagaatgagagcagcaggcttggcctggaccactcagaataatcaatagggtaccatggtgggtgtgagatgcacaactctgtcctagacaaagcctgcgtgatgttttacttttcttacatctctatgtgtgacagagtgcccccccccgggggggtgcagttatgcatgccacacccacacatgcctgatcatcctcagcatggtctccttctctcagatccgtgttggctgcctccgtgaggtctctcagttgctgcactgttttcccaggatgccaaacaaatggcccttgtgggggattcctggcatgcggacttcccgcctcgttggtatgctgaggacttcttgcttacacataagtgcttgtttctgagctgaggctgtgttgctgggtcggctggcaggttgcaccaggcaggcttgcttcctgcaggggattggggatgggctttttgggcttttttttttcctttttttttctttttccatgcaggagagagaaggcagggggatagctcctccctgaatctgtgactagtgggtgtgcaatatgcacagcagtgctgtttggaatcaggttagcaatgaagccatcttgacctgggtgcggtaagccacagcgatggagttaaactcacctcggggccacgaattgtctctttcagtctcaaaacacctccacctctccatcccgaaaggaatatttgagggtcattatcagtgtcttacatggaaggggtgttctgcagcctgagaacagtgccataaaccggaatgtactctgtgaaaggaccatggagctgtcatcatctccctttatgtcagaaggctggagttggggagggggatgagagagagaaaggcaatggtaattcttcatggccggcatcctacctgaggctctgacaaacatttttctgcagaatccacaaggcaagtggctctgagaggcagcgtttcctgccattttataggtagaaagcttgatgttcacagaggagggatatactgccccagtattgggggacaaagcaacattaatgatagtgttgtagaagatacagggtgctcacctatatccttgaggaggacattccctctgcagtgtgaccagaggattggcaagctgacttccaactgggtctcttttaaaatcagaaagattcctcatcatcccccagcccaaagcatctctcaacaagtgacaatgatacagggctggaaggactggtacccaactctctcatggcacaggtgtgaatctgacatcttcctcacttggctttcagtttctttatctgtgaggtgaatgttgctaggtctcagtacgtatagacctaaggtaagcagaggttcccagacatgctctttccctgcacagaggcctgagaagcactgcctggcacccagtcacgttccctgttgcttgggtgtggaacagggagcgtgcagtgatcttggatgatgagctttcaaagagcttcctcggaggaatggtgacaacagaggttacttccgcagacaggagccccgtgagtggctcagctccatcacatcgtgaagtcttgtgctgagggctcagcatgatggtgtttctaaagagcaggaagttagtgtaagttttagaagggagttctgaggactcacccctcctgcaggagggcacggatgctccttcctcctccacagctctgagtatgccaaggtggaaccatctcgggaggctccacaggttacctggctcagaggggctcagtggactctggagcatgtgaacctcctgtgcaccatctaatttattcatccttttgtcttgtctatactgagcttgttcctggcctcccagagcaattcaatcccattgaaatcaccgtgactgatcactataatctttttattcaaccccttaaacaaatgaagccaaatacccgaatagaggcaccacgacacatgactctgagcaagacattcatgagggctatattgtctgaaacggctttccattcttcgagggaggatgaatctctctctctccttgtttaagcctctatccctctttgatttccccctccccattcattattgttttgtctgtgatgagcatgggccgaaataaactatacctaaaatgagagatgggtagagaattgtaaccttctgccattttaaggatcccctcggtctagatgtgacatagatgaagggctgattatctctactgagggtggtcttgaagtagaaccaagatttcatcattatgagagacaagggaaccagaaacacaaggagttatacaaaggtgcagaactgtggcttggcctggcaggctcaagggcctgtctgtgaacaagggtagagagaacatgtaaagagaatctgatagaaaaaaaaatgaggctggagatccagacttggccagctcactctggttctgctactgagtgtcaccaaagagtcccaaaggccataggaggccatgggaatgttctaagtgggtgagtgacatcatttaactcgcttttaaaaataattgctgttgtgactggcgacaggtgggtttggaaggtcgagtccatcattagcagcctaagagagttgaagagtgtggaatggttcagatcatggaagggtggctctggggctggagagatgactcagtggatgtcgtggctgccatgtgcacatggaggtctgagtttagatctccagaactcaggtaaaatcctgagtgatacccaccagcaatctcaatagtggatggaaggatggtgacagaactgggtctcgcccccagagcttactgccaaaccgacgggttccagattcagtgacagactctgtcttgggaactaaggtggagagccactgagaaagacacctgatattcacacacaaggctcacttacatgggcacacacataccacctaaacaaacatacctatagatatgctcatgtacaagagaaaagtaggtgttctctctctctctctctccctccctccctccctccctccctccatctgcatgcatgtgcacatgtgcatgtgtgtatgtgtgcattcatatgtgtgtgtgtaggtgcatgttcatgtgttgtgatagttgatgaaggtgtagatttggtattacttcatcaccaggcataggctgtgagaaagaagtttggataccacactagtaggatccttcctgtagaatatgaatacagcaggagccatcgtgtccacaagcctctatcctctcctccatcctcccagttgtgcccatgtttttcttttgccctaagaggggatctcactgctgatcaacccctttctccagtatctgggcctcatttactccatcatggtcccagaggttgacttagagctagagacttgaaccagttggctctcaccctgagtatagcagttgaactgagcagtatgtgaccctgtttgaaccagtgaagcatggagaaggaaaccaagtcacccctcttcctctgggtaaaattacgcacagtgtggatcttgatactgcacccattcagtctacatgtatgaggagcgggtccgctcagaatgatgttgtgccatgcaagcagaactgaaggacagctaggatgattggctttgggagctcatagcatcttcagcccttctggtatatgcactgagaaaatgtctcagtgtcttaagtcagttcatctgtatttcccaccacctcatgctgctagaagcatcttcctggggcatccggtcagaaggtgttttccatgagtcaaccaaggaggggcaggagacaggaaagaataatagtaaaacaatgggatccagaagctactgtcaggggaagaggctctggggagtgacccatgtctctggcaggtaaggcctatgcaggtagagtcaccaaggtcaggcttaggccattaggcgctactgtggcttcttaatgcacgttcatgcctgtgcttacctttggaacttcagtagtttacattgagccttaaagccatggagctgaaccttacacacacacacacacacacacacacacacacacacacacacacactgtggcatatgaacattcttattcgaagaacataggtaaacataatagcacactctatccacaacactagtcttgaatttttctcagctgcacttgttcaatcacagtcagtctgtctttcctggccttataaaaaaaaaacccacctcacttgcatatgtgtgtgtgtgtgtgtgtgtgtgtgtatgtgaagtgagtgtgcatgtatgtgtgggcacatacagctacacatgctgttggaagcccacagagggttagggcgtcctctgtcactctctgcctggttcctttgaggcagggtgtcttgtgagaactgaagtttgtggttttcagctaggtgggcagctgacaagccccagcttctgcctcccctcctttagctcaagagttccatgcatgtgagaccacggctggttttcacatgggtgctgggatctgaactctggcccatgcctgcacagcaagcattcttaacagacgagccttttctccagctcaatagctaattattgctgctgtcacatgtgcatatatatatattttaccttttttctatgcatgttctacacacacaaacacacacacacatacacacagaggcaagagagggagacactctcatgcatgcatgctctcgcttacttggtaaacacagttgcaattatgctttacaaatgggtctccggtgtccatgtgacagtgtggagcttcatagagagggacattctgagcaatgcttctctaagccttcggcatctgctctctactcagctcacgtttgctgtgagggaaatgccccttagtcttaggacaatgaaggtatctgattttaaaacaactctgagcctttttctaaattttcttgaccagtgcatagcagtctgagagggaaaaggggagctgataaaaaccctagtaaggggtaaaaattgggaacagaaaagtaaaaaaaaaaaaaaaatcagggaaatgtttaagcaatacaatctctatttcagggaattgagagccaagtgtagattgttaaatgggacattctcagagcttgggagaggtgtgatatatagtatgtaattaagaggcatgggagagtgccattttttatatcccccacttgtcacttgtgcagatttgatttcaaatatgatttcttaggttacaagggtaattaattgtacggactcttccaggagatatcagtcacccatgtcaccctctaaattgacagaccacgggaaggaacacttgggaaacactcactgtagatccactcacttaactggggttagttgtgcacctactatgtgctgagggtttttctgctcacactgagaagtataatggggtggaaggcattgtgggaatctcatgtagtctgttgaggacagaacagacagaagcacaggccaagccatactgagttagacctttggttttaaaccaggacagggcacctgactcgtcttcctcacttgaatggaactcgcctatatgtcttaattttctaaagtagttatatattattttaagctgtgaactcaagttcacttaagaggaataaaaggacaaaaggaaatttcatcagtgaccttacaacattgagtgaggcaccttcatactccagtgcattccctgttgatctcttgggcaacttgtgcggtatcatcaaacacgtgtttgcttagtctttgaatctgctgttaaacctgaacaggagacaggcttttcctgagcacatttagcatttgatgacatagctgctcccaggactccagaatgaagtgtgggaagctttatccagaagttcaaatcctctgtagggtttcttgcttggcaaggtggatggctccatcaggcgggctggctgagggtgccctttcttcttggtcttctgatgagttgtggctataattcctgtgtcccctaagtctttggattcttggtgtttaatgttttgaagtatctgttggttaaagtatcacgaaggccttagttatgcatacctggatctggagcttcctgagtcatttctcacttcttagatgtgtttcctaatacttcccgacactcagttttctaatgaggagtcttactaccccatctcccttcccttccctcccctcccctcccttaccctctccttctgtcccctcctatcctcttctctcctcccctcatttgcttttttttcccctttgaaatactgtatgatcttgctgtattgggacattactgttcccatgctatggtggcaaagtcctcttctctccattgaggtaatgaggtctgatgtgtgattttgaatttttgaatggagaatctttaggacactcagaccagtgatagtctattctttctgaaatgggaggttgaacccatggcagatcatgactgccctcctctctagagaagaacattttatttagccactgctgtggtaattcctccccctccccggacacccccccccccgagttcttcctcttcctggggctgagaaaggttcagcaactggaagacacagtgaggtcaggacaacaggcataattgtgcttttgggggaaggcagagcaaggagggccagctggggctgtagagcacagatgttactggctatgttggtgttgtgtagagagccatctcagagctttggtgttccaggggtgcctcagtggacactggggagggcagtctgctggttatgcctggctggaagatgctgctccttagctccaggcagttgtggccatgaaacagtttggaataggtcttgtcagaattttctgtgttcaaaagaatgtatgagttcagcattctggttggaaatctcattatctgaaatattggttaagtcttaaaattattcttttgtatagacgcaatgaaacctaagtgtaggctacttgttagttagggatcatctcatctgcagattttaggagtctgcattcctttccacagctcagggatgttcacatgacctttctccagacccttcacaattctcttggtacttaaatgagtccagctgtcatgagagtccaagagagtacaaccttagatgtgtcatgtggcaagtcaggtcaactgtgattcatattctctctctctctcactctctctctctctctctctctctctctctctctctctctcatacacacacacacacacacacacacacacacacacacacacacaaaaatacaatggtaatgttgggtcatgattcactagtgacagtggtaagctcctactgtgactatgagtgcttcctgagactgctagtgctcttcacgtgggctcatttaatcctcaagacccagtgactaccaagacaggcaattacctccactttatggaagctctgtaaggttctgtagtagcccaaggacacacggctgacagggacagagccagattttgtcatctgagtcttccacttcacacaaagtgactcttcatgagtccgtggaggggttatttctccctaccctaggctttcacacatgcctcctcggactgggtcttgatcatagtaggtcccctataattaccattcttggtaatcatgctgttgggttggcttttctccagtgggtcgatttagcccagtgcaagcagtttttcctagcagataatgagactctgtaaacccacattttcatgacagagtttattttggtgaaatacaaaactaatgcaaatatttactaatttttcctttattaaaccataatacacaggggcatatttttagagatgataaatcatttccttcacaaagggatcttgtggagaaagaaatgctgcacatttaaaaattatatactattctataattgtacaaatcaaacacgtgtattatttgtaattacactggtaatatatgtaattacatgagaaaacaattacagcaaactgcattccaagagaacatgaatcaagattttttcctctcttctcttggttattttgcagcattaatttgtttcacagaagtaagaatattgcacagaccttaaaaaaaatttctgacctaccttgggcactttaaagatgtctcaagcagactgtactgatgtcttccaatcttggaggagaccataaaacctatcttctttcttcacttattcttttgcctgccaaaaacaaaatgcagtggccagtaccttttgctctgtggatgctctaccaatgctgtaattgtgcctgcagagtggttttgttgtgggtaactttagaaaaaaaaagctgataatactttttatggcttctgtaaaaataaccaacatggtttggagaataatgcttatgacccactgggtagtaatacaagtctgaccgtccttccttctttccttcttcccctccttctttgaagaattgttacatttatttattcatttatttatgtatctatttattgtaggtgtgtgtgtgtgtgtgtgtgtgtgtgtgtgtgtgtgtgtgtatgttttgggacatacagatgtcatagtatatatgtggaagtcagatgacagcttgaggaagtttttttctctcnnnnnnnnnnnnnnnnnnnnnnnnnnnnnnnnnnnnnnnnnnnnnnnnnnnnnnnnnnnnnnnnnnnnnnnnnnnnnnnnnnnnnnnnnnnnnnnnnnnnnnnnnnnnnnnnnnnnnnnnnnnnnnnnnnnnnnnnnnnnnnnnnnnnnnnnnnnnnnnnnnnnnnnnnnnnnnnnnnnnnnnnnnnnnnnnnnnnnnnnnnnnnnnnnnnnnnnnnnnnnnnnnnnnnnnnnnnnnnnnnnnnnnnnnnnnnnnnnnnnnnnnnnnnnnnnnnnnnnnnnnnnnnnnnnnnnnnnnnnnnnnnnnnnnctcctcctcctcctcttccttttcctctttcttctcctcttcttcatcttcttttcttttgtttgcttttttactgagacatgatctcactatgtattccgtgatagccttgaactcatgatccttctgcctcatcctctatatgtgaatttaccaccatcatcagtcaaaggacacgtgtcctcttaaagaactaagggattaagtggaacgggatagtaagggccacaacagcagataggacagcagaggtttttgggaaaggcagtgctggccccacagaagctatagcagaaggcggggactggtcaccatggactcttgccactcattctagtactgcctagagctccatccgagagtcactgtgttccaaggatgctttggctgacatcggtgtggtggaccagctagaaggcaacactctttggctccatctggctgttgctgtgaagcatcttgagcctggtactgccactggttctcactgtcaagagtctatgtagatccacctttaacgtgggctctggattttcagttacagggaatgtgagtcagagacttcaggagaagattatcattgattccttcatttatcagccatgtgtagagtaactggtgtttgcatctgttgccatgctgggccttggggttactgagatgataaaatatggtggtcaggagattcacaaacaaaggggctgaggaacttatgactagaaacatgggaatccagatgaccttggagggtgagggtgaatttagaagatataggtagagatgatcaaggtggaatgggtgatgggttggtgagaacacattccatgccagatgaaagatgtgccaggtcagagatgtatgggtaaatgagatgtcttttaggatatgtgtgctcagtggtgcaggtgtgtgtgtgtgtgtgtgtgtgtgtgtgtgtgtgtgtgtacagttgaacacggaggcagatcctcccctcctagcctgtggtgaaacatattagtgatctgatattttagatggtgtttgggaatcgagcatacctactagaactaccaaagacagccctttgctgcaagacattttttttctttttcatgtcttgtatgtgtgatatgcaagtatgtatatgttcatatgtgtattcctacatgtgtgtatatggcagaagcttgaggatgacattggaagtattccttgaacacgtttcacatattcactgaggcagagtttgtcagttgaacctagaatttgctgctttggctaacctctcctgtctctgccttctgagtgctggaaatagaggccaactgccacatacacacacacacacacacacacacacacacacacacacacacttgacatgcccatggaatctggggacctgaaattaggttcttacttggcaagttctttacccattgagctattgtgccaggccctctatgaaatgatttgtagatgtaacctctccttattgacatggagttgctcctggtgtctactgtgctaggaagtatctagctggacaaagtgtatatgtgtttgtggctgaagatgagaatgtcggtcctgtgttatcactgtgtcttacagcaggtggaaggagtatctcttttaggcctcttggaggtcacttcacaaactaaggaaggtaatggatttgtccttggaggcatccttagtggacaactggcatctctgggcttctgtaggtccatgacacagagagaggctctaggaacgcacagagaaacgtgttgcagagctaccttgttctgccgctgagtcaacttcctcttttttattacattctcccatcttgactaaaaatgttagcacacatatggctgcagagtgtggtgattggaatataaatatcacctactttcttcttgtgtttagcagacattcatgagtgtcaggctctgtgcacaagtttacatctctgatgaagaagccactggcctctgtttctctccactggcctggggtggggagagggaggagagagtttgagggatttctcacagggggatatgtagaaaggagatgatggtaacaatgatgctgaacatagggataaggctcgaacacacttctggtttaaaaaacccaccaatccctgtgctacaaaacccaccagtccctgagctaaaaaactcaacagttcctgagtttaaaaacccaccagttactgagctgaaaaacaacaacaacaaccacaaccacaaccactaccaccaccacaacaacaacaacccaccaatccctgaatcagcccaagctcaggacttgaaattccacctggaattttctactttgggaaactccacctcaaagaaacccttagaagtctgtctccagctcagttctttgctgcttctcaccctagcggaggcagccaccctcttgtgtctttctagataaatctcttatgtgaggtttgttgtgcaaagtaacaacaatgtaatgtaaaaagagtgatactctttttttcctgtttatagtgggggaaactgaggtatggcgaggttttggatcagtagaagcagcagaattgagaccaagagcaagtaccaaacacctatatgtggaagtcaggagacaatgcagtcagtttgatcagaggtcagtcaccaggaaggatttctttctgttggtcaggtgatgtcctttgcatcttggaagaggagtaccatgaagggagtgcctagaggcagagggtgtgtgtcagagcagtttgcttctacattaaatcctttcatcttgggggcaacttcttaagatattaaaggttggtgaaatagcaagtgttcaaatttgacttggagatgtcaaatatagcagggaatctgcttgagattggaagtaaacaactcaaaagtagctccaggaagtccctgaaaccgaccagattcactaagaccctccttccccaagagtatacaatgaagaatgaaagttactctcaaataagcccctcagcctcttagaagcagaaaccactaggacagcccagaagaaacaacaccaactgaggttcccagaagagggtttgagcaatcgagccctctgaaaaggacactctctaacttgctgagctgcctgcaggctgtgcagtgtgctccaggtttcccgcatccgtgagtggtcacccatgctagtcagggctttggtgattcagctgtctttgagtcatttctgcttctataaaccctcacccacattcctacaaatagtctgaaaaacctcattgcttcaccaagtctggcttcagtggtgtccatacttagatctgttgtaggttccatttctggggtgagtagataaatgtgttttgtctccccaggaaaagtctgtcataaacagtatgttaggtgggggtcctagagtgagtacagttgaccatgggtggaacatggacttgcagtcatcaatgtactgggtaaaaggtgaggggcagtgaccccaggagtcacagaggcttgtctggaccacgccaggaaggtcttaggttgaggctcagactgctctgttgtccttttagatggatgactcgggatggcagggactgctatcttcctgatcatcaaaagcatctctgaagttcttttagaatccacatgaagtggtccctggaggtttctgggaaccctatgctacttaggattgtattgcagaaagagtgcaacacctcaaaagcaaacagaagatctggaaagggggtcatacagatgaggatctctgaagagtctgctccatcaatagcatgcaaatccccactggatgatctttccctccccattgtatgtgtgtgtgcatgtgcgtgtgtgtatctaggtctatgtatctatatgtgtgtttttgtgtgtgtatctctctctgtgtgtatgtttgtgtgtttgtcttatgtgtctatgtttctgtggtatgtgtttgtgtgtctctgtgcacgtgtgtgtatgtctctctgtgtgagtttgtgtgtgtgtgtctgtgtttgtatttttgtgtgtgtctgtgtgtgtttctgttagtgtgtttgtgagtgtgtgtttttgtatgtgtatctgtatgtgtgcctctgtgtgtgtttgcgtgtgtgtatctctctgtgtgtacctgtgaaggaccaaagttgatgcccagaataacttgcaaccgactgctcttctaccttactctctgaggtaaagtctcttagtcaaacccagggctcatctataagactggcatatatatatatatttgctctatatggcaacccttgagccacatatttatcttcccagcctgagctttttcattgaaatcacaattgttatttacctcttctggtaaactatgatctattggtatttttgattaaaaaaaaagtgtcttaaccagtattgagaaatatttatatttccatgacatccacccatgtttgccaggaggggaggttggtaatcacaaccttttcccatgttgcctcttggaagtgtctgattgtgttttggacaggagactatcatcagtgtctacaaatgtcttttctggccatcccgtttttcactgtataagatttggcaatggttgatattctggatgtaactcccaggatgttcctgccttgctaaatttcagtttgtatgtctttcatcaaatatttggcttagctgggtctgcttggcatattgtgttagctcaaagtgagttattgtctcagtaccatccattcaatacagagaggtaatatttagtgtgtcagaggggattaagttgtaatctcaagaaaaatataggaagttgagtagagaagaaattccaaggagaagaaccaagtagttattaaaatagacttttctaatatatgttcattcactgcaagttacatccttagattcctttctcatcaaagcgtctcaaagagctaatttccagtagtttctatcccttcttgcagctgaatatttggggtattttaaagtgatatcatcaaatagatcaaaaatgaagtcctataaatgatccttaatcaacaggctccgtcacttcatggcacagaaaacagggaacaaaggacgatgattttaattcaaggaaagagagatatttattttaagtatttctgtggaatgacagaagtaatttattcagttataattaggcacattgtgaagtggacgattgcagagacagtgattcttgccggctctgggatatcagaggaggctctctgccctgcgtgctgtgctctgcagcctgccaggaattatctgagagttggggtagaagcagaggcaagtggacactgggattgtgtgcatttctatttggacagtgaaagtaggatttccttcttgacaaactctggatgcaagtgtttaaacagggaagttgcttgggtatgagatggaagtgacttggctcaacagtatggaatggaaacaactttaaggagcccagtaaagaggaaatgatctatgtatccatagtgaagtgtagcggcttaagtgggccatgccattttggggtgcattcacagacatttagcgaacccatcagtagaaaatcttattcccccctcccccaacaagtgtctgttgaaggcttcttacgggtcagatcttgggagagactgatgagccctgtaagtgcctttccttgatgattagggactttgcaaggaggcagataagtggattggataatcacaaaacagcaagggaagccacgagtcggggagtgtaatatctaagtgctgaggctaagaggtgaaggtcaagctgcagagacatggggaccctaggacaacctgtagctgcttctctaggccagcaggagccactggtgagttttagtctgtgatgggctgtgagctgctttgcttcttgacagcatcatcttcacttctgtgcctctgaagtagatggggaggggaagatagtggctggggcctggttaggatgcatccatgagagatgtgatagagggttatggcatttggaagaggaagggctgagtatctggacctcataatatattgaggatgcaccagagacagtggggtatgtgagtgttctagggagacagaatcaaagacgatgcctggctgtgaatgagtcagattcattcagtggtatagggcatttaactgtatggagtcgggatgtagagtcaagtttataggcattcaaatttaagtgactatgaaatgctgcagtaggggtgcccaagagatgattagaatacaaagcatgggattgaatctggcagcagatagatacctgtgtagtgggaagagcctaggggttggcccaacactggactgcttgaactatagaagggatgccctatcctggattatttgtgcacgtgccaatagcagactcagagcccagaactgttagtgggtagctccttccttggcattgggtggttgggcctttacatgggtatgaattcctgaccatggtggggaagtgtgttatgacacagattcaagcagcaacccatgtgaatgtttccaggagtagaagaagttaatggatttggtggtattggagctagggaccttttagatagatacatccacctagtccatcagctcagccactcagagtgtggtatttgatggtggttccagtatcggggactctctggttagtttgttgcctgtctgctgacttatgtgaccgataactcctcaagacagcttggattttgaaatgccccccagaagctcatgtgttgatcaccagttgttggtactactttagggtaggctgggcttcaggaagtaaatctgagtaaaagtgaggtcttgggctggggttgtgtgttattttgtccctggtcacatcctatcttccttttttttttgggctgctatgaatcgaactggtctgctctatatgttcccattgccataatgtcccaacctctcagcaggcccaaatcagcaaatccagttcaccaagactaactgtgaactccgagcctgagtccacctgtaccttgcgttgcttttgtcctgtattttgggcacagtgatgctaaaactaagtaataagggtcccagagctatcttggccactctgctcattcttgggatcataggtccttttctatctgcgtctccatccttcttgatatgtggacaaaggaccctcttttgtctccccttatatcagatggctggatagtgttggagaactcccctgttcccacctctaggcctgagcaccttggcgacagcacctggggaggaccttgcttcatttgtgcttgaggctagctcaaacatctgccctgttgtctatctactgttcccatcgcccgtgtagctcactacctctgtctccgtgcttgactctgggtatgtgtacctattactttccattcttaattctctatgtcttcgtctccttgcagatttggctctgtacccttttcctggattgcaccataaatgtggggacatcctagtctgtgctgagccctgtaaattccctcagcccatcatgggacatagggctctggtccccaagacacactttcctatcagtgtttataggaacctccctacttgtcaacctcaaagccaggccctctaccaccactgtcccttgcagacagatttctccaattgtctcagccttcattcctctctcctatgccagagtagctcccacttccgttcctctgtggccatcttctgacagcccctattttcttgtcactgacttagtcatccctcatctagttcccttgatgccatctactgtgtagtctcttttatttcccagagaactccttcatctggtatcaggatacaggaaacctaagtggtgcccttgtgttttgtggaggggaagatagaaggcgctacgggaacctttgaaagcagcaagcatctagtcctgccctgggaggctcacccagatctccaggcctgagcaaaagtcctctccaccctgccctcaaggaagttggacttagctactcctttaactttttacatggcccacatctagcacatttccaaggtagggttccccgtatctgtgtttccatctgacactcttcctctgactcctagaacaagacagttgttgccgtcagtatctgagtcagcgtgtctcagatcccctgcctctactctccagaatgaccccttgcttacagaatgaccccttgcttaccttgctctgtaagtgttgctgtttccacctgtgtaaaactctgtcccatctgctcagtgctcacatgttgaacctggcacttggcaggtcttgctaagtttttgttgaatgactaagtgaatgcatgaatgtgcaagtgttagattttagtcaagtgccgagttagcagccctgtgagccctttaggaggcaaatagagagccagagctgagctttagaggcagtgagctggtgaatttacattaggtcaatttgctgaagactcatgaaaatgggaaggaagggaggagagggagagggagagggagaaggagagggagagnnnnnnnnnnnnnnnnnnnnnnnnnnnnnnnnnnnnnnnnnnnnnnnnnnnnnnnnnnnnnnnnnnnnnnnnnnnnnnnnnnnnnnnnnnnnnnnnnnnnnnnnnnnnnnnnnnnnnnnnnnnagaagagaagagaagagaagagaagagaagaaacaggtacccctgctgttatgcagatcttcagaagagtcactgggattgttgaaagctagtcagaatgggaaggagggagactcctgaatatgccaagctcagctcatcctcagctcattgggacttctgatggggcaaagaggagggcaggatctcccggaagatgctcctgatggaaaaccaggtaggctttgagtattgttcctggtggatgctcttggggaggttataatagcagctgtggccataccttgaagccccatggtcaggcattacagttggcacccccctccccccacaagtgcttctatagccaattatctggagttgagaccataagttaccagggacatacttgtggcagggatgccaattatttaatgtaggtgggtagactggcactgtttctgccatatggttgctgttcaacaaactgcagctacaagttgagtaacttacctcaaatataatatgtggttcaatgggagagggctgtttgttttatagacggcaggcagtgtgactctttccacctagatggggggtgggtcacatctacacatgctcggcttttatcaggcagaggtgttttcttagtggagacacccgtggggagtcaattttctttgactcggtacattcagtgtgagaccaggcctgaaccaattgtgaagagagcttggaggacacacagttgatgaccagagggcgctccagtgctccgtgtccccacctgtactttccctatgtgctggctcatagcctttgccttcttttgcagcctctgtgtgtgcacatctgtcatttttatttgaacatctgagtccttttagaactccaggcctggttcactactgcaaggtcttctcatgcaacaacaccaggcacttgaatgcgcctggggctcaggcacacagtcatttccttcaaatcttcttagtgggttttgcatcgctcctgacaatctcataggcacgtgagagggaggggccatgcagagtacccgacctgcttctttggaaatcttgcgaccgagtcttgagtgttctaaatggatgccattttgtcaccttgaagaaagtccttgagatgccttctacccccagagcaagggcatctgcatacaactcaataggttatgacaccggaagcctctctccccgttgttgctttgtgtgaatcctgtttcaagacattgccccgggtgcttgcaagctgttctgtgtttcttgcaatatttgtgcagcctgatgaatttataagttgtcagtatggcaaatcatgaaaatggccattcattcctccttgtcccttgtctgctccacgatacagcttttctgatccctccatcgagaggcagaggctctttgtctacttttgaatctgggcttcgatttctgtgacttgttttggccaaagagacagtgccaagtggttcacaagagtccttgggcatgggccttcctctcttgtttcttgggttcttggagtctctgctgctgcttctgtgtggaaacgtggatcagcctgttgccaaccacacatgtagggcacacctagcggttcacatttccgtacccggtaagtaagcatctagaccagagcaatccattaccgatgcacagttgaggctggcagagatcagcaggaaaatggttcagctgagcctcgctcaagggatgagctacagagtcataaacagatacttggtggttatatgaagttttgaggcagttttgttacatagcaaagattaactgattcagtggatccccaaatctagtgagcgcgtgtgtatgtgtgtgaatctcaaagagattaaaaaagtagactacaaatatatttgctacagaacttcttttagaaaaactaaaaaaaaaactttctcaaggtcagtctaaaattcattctgtagcccaggctagcttggaactcttgatcccccaaactttgcctcccaagtgctgggattaaagacatatacagctttgagttaactattcattggggactggatgctgtcatcaagtttatcatcttggcatttcccctccacttttcctgaacacacatggcttcttgactgtggatttccaagttccctggattctctggtctaagtgtgaatctgaatatgtgtacataccagacactgggttagtcgtacccaagaattcatgatccaagaagtgaggaatttaagtgtagcgctatccttagcacagctctgctggttgggagtaattgactgaaaactataaactgctcagattcagcattgtaaaagataatttcacacacagtggctctaggagggtatcaaggctcaaaaaagtaaactggattaaaaaactcttgtgaccagggaaccctgaaagcagtgttaataagcacacgtatggctgacataagggatggcagacttgggacaagcagactgagtgaagtgggctgagtaccaggccagctgtaacatgcaatccaggagacccaccccactgtattgatagtctgaaagtcacttcacactcccatccctccacacacactttagattaaaaaaaaaagtttctttctttttgaaaccatgtcccactttgttgctagattcggctaagctagccttgagattgtggttgccttgtctcagcttcccgagtgcacagattataggtgtgttccatcatggccaacaagattggcttaagtattgtgcatttacaaatagttatagaaattctatctgatacatgatgtgtgtgtgtgtgtgtgtgtgtgtgtgtgtgtggtatgtggtggtgtatgtgtatgatgtgtgtgtgggtgagtgtgacatgcatgtacatgtgggtgcacttacagggcatgtctgtagtgagatgcttgttgaatgtttatcatccttgcaaagactggatacagcataaaggcatgcaagatgcaatattgtgaaagatctttatctatggaacaatacctaacatctattaattgggtacagaaccttgcccagtgaattatcagttgcctagcaaaaggacagatacatttatgggtatacacacttccatgtgtaagacactgactgacacgagagaagcactttcatcatcactgaaagcatgggggcggggaggctgttgtcagggctaggaggatgctcattgtatcctcctatatttttctatctctatttcctgactatctttataaaaggtatcgacatgcttggttatattaagatctttcaagctcagtagcatcctcccacagtggctgttgtcctgttgccggttttaaactctcagaaaaagagccccaaatcctacatagcagaggattgagacctcccaggagctcttcagtggcttcttggtctcatatgaccattttctgaggccacattgggtgtttgcacttgaaagaggaagaaagagcccttcactcacatggaaagttcaatgtctgtcttgcgtgcataccccagccctggtgccctcttgacactgtccagtccttagactggtgtgaacacagcatgcactgtacccaagtgggcaagctcttcatctttagggcattcccaccaaatgtgggcttggggatgctgagcaggttaatggggtgtgaggcttggctggtgctttcctagctacttcagcacatagagatcctcagggcttttaatacccaggggtaatcaaataaacctagaaactgaggagtgcgaagaaggaggcagcatgtgcaagttagctgggaaagccccgtggtcccacataagccaaaccaggccaaataaggattgaaaaccattgagtggagagaatgagatgagagaaaggggttgagagagagagagagagagagagagagataccgtgggaaccaggactaccaacaaatccagctatcacagtgcccagctgagtcctttcgtggtctgcttgacaaagcaaggcttctggtttgtactagcgcatgtgcttattagagtacacgatttattttcgtgtaaattgtcattttagtgagatacgcagggtgattttgttaccacgccacagcagaaagtccttctcaaggcggaagaggagggaacttggctgggtatcagatgcagatcctgtgttttatgaacgatcaagtttgtgtccagagagggtgaatgtgtagccttccccaggccatgcagggaagagcttaggggctaagtgtaggatgttcaggtgcctgctgcccacctccgcttttgctggtttgtacagtcatggctctgtgaccgtcagcaagtctctcattagtgaatccgtagactatgatatcacagccagcgccaagctgtggctttgaggtggcgtgagctgtggttggctacagacgatgcatacagcggggctgggcaaactcagagggagaatgttggtgactcggtcaggtggagcaggtgctggtgcccccggaggcaggtggtagaggcctcttcgaggctcatgggctgtcactgcagatgacaacaatggcttgtttatggaggattaagacctcaagtacccttgggataaagatgcatgttggggattcgtggtgtcagaggctctactggaccttggacttgtgcattgtacaaagaaccacatcacactctatagagtctaacttcagctcaccgcagacaatcctgtactcagacctctagttccatgattgggttcaagaaacccccagaactgttgatgccttgagtttcttgacaaaagatcatgaactctgagaaattaaaggactccatgtcatccaggtagtgacagacctggaaaaggccctttggctttcaggctttcaaggcctcttttatcccctctcacccgtgtgtgggcttcagggttctcttgcattctcagttaacattccaggtgtgggcttcagggttctcttgcattcttagttaacattccaggtctgcttctggaggctgtagcagtgtgcatgggtggtacatgtgtgtgtttggcggccaaggaaactccaggtgcttgccagtgaggaactgcaaagcagcacaggggacggaggtcaagaggatgactggacccacccaggagtccttcagacctcttgggaactagctacctatgagccaggctcagctggtagcccatggtctgtcagatctcctgagctacatgtttatttgtactttttggcaggagccagctaactaactcctctgtaaacagatgatagggaatcttttagacttgcagcttgtgtctgttgcagtttctcttctaggctgctgtcgctgaaaccagccacacgtggtacaggaatgaatgagtgtggctgtgttccaataaaactttatttgtaaagtagatagaagccacctctgtgtctgagaaaggaaactgggttcttaggggtcaggagagagcttagttctgacactgcatcagacactgcatctctaaggagtggtcaggagagggtttggggcaacgttttaagtgaggtggatagatagggcaacagaagtaggaagcctcagctgagagccaaccttggttccagaatctgatgccagctatcatgccagcccagagagggatctgggcagaaccatttgaaatgacatcagaatatagtgtagtctgctgaggacctagatagcccagcacaaacatctctaaataaacctagagcctttgaacgaggagcagaaagtctgcagctagggggaggtcaggagcagctatggatgctgatgatgcccgacaagctgtccttcacacaggcagattctgaaggtccaatcctggtaatgaatcagctctgttaataggaccgtgagaccaagcaacgatagctaagtcaaagcagataatgtgggattcctctctctctctctctgtcttgctgtctgtttttctctctttctctgtggtatatatgcatagcatgttcggggtgggtgggtatgtattaactcaccggatggaaggtactgtacgggaacggtgtccgaggctgttggatactgcagggcgtctgatagctttaggaagaacatgtgttctgggcaggccaggattaagaaagggaaggcagtgtaagcacacatccagcaactatctattgagcaactactctgcaccaggctttcttctcggtgctaggatcctggatggaaggcacctgatttgtatttgtgggtctctgcggaaaagaggttctgacatctcgagaggatgaagatggaaaggaagcttaaattcaaaccaggtattttatggggagccataacatcaggaattctggcttcctcttaattacttgtgcctaagccaggtcgcagctgtttaggtgaaccagagtgacaaacaactagacagcaactagtttctatttggttccgaggagaaagcaacacccagcttttagaatgttcagggcaggacccagcttgtcagcagtgtttcccacttggctagcggtgtaagcacccagacaattcttctttaagactttaaccagtttaagcatttcttcagcagagaaattgccttctttcctttgaaggctttctgaaatttattctgtgtgactttgccttttgaaacaaaaggggagagtaaatgaaattcagatgcctcaaggtcagagtcaggaccccccctccccagccccctcgtccccacgcaggcactcacacctacacgtgtgtgcacactgtcataacgtttccttaggggctgtctgatatcgttgcccttgttctcagtggcctgtgattattgtgccttttgagatcttgtattggctttgaatagtctttgtgtttcctcccttgccagcagcatgcctctctgtggcaatccccccctttctttattagtttttattttatttgtttgtttacattaagtgtgtcatagtcatagacaatgatctgagaaccacagcctaaggagcccattacctacagttccaccacacagagacacttaatgtgagtatttggattcatagcttctctgagtatctctctgagacttttttttctatcaaaatggggtcatggtgtacacattgtatgctctgttcattttcccacgtaatatcctaagcatctgttaaaaatgtgcttctatatagttcctttatgcgtgtgcatatgttcccacaaaaccctttttccagaagtgtcgaaacatatattaaagcatagagaattgaataatgtcagtgaactacattatactcagcttcaacaagtgccaatattagcccaccccagctgcctcttattaccccattgtgtgttctgcagcatttaaaaaccaaaaatcccaggtgtatcatcaccttgctcacaaacagttcagcaaacatttctctcacagtggcttttgatcaggggcaagctccatactactctccaccgaagggtcgttggccacgtctggggacattctgcttctcactgctgggagaggaaggtgctgatggctgttgctggcatctagcactacagagcgggggacgaatcctgcaatgcaaggcctggttgtttacttttagccaagaattgtctcaccccaagtgtcactaacccatgtgttaagaaaccctgaatgtaatgggattaggacctccaaaggcataaacagtcctgctgtcacaggaaacaaaacagacagttccttatcaccaagatttctttaacatctcaattattttattttcttactgtccttttaattggcataattttacatagttatacagggtgacaatttaatccatgtatgcaatgcacaaagatcaaatcatagtaattaacctctcacctcgttatttctttgtgtttggagtcttctctcttctagttctatataaaaacacaatagtttgttataatctatatccactgtgttgccttctaggaacctagaacttagtcctcatgcctaattgtgtcatgctgtctgttagattcctattcttctttcctgtcttcttctagtctgtggtaacactcttctttttgaataatcatttaaaaatagccatattgagtcattacccaagacattccttcaacttttttttttaatctgccaagatctcctccccacctcttctttctttcttttcttttcttttcttttcttttttttttttttttttcaagacagggtttctctgtataaccttggctctcctggaactcactctgtagaccaggctggcctcgaactcagaaatccacctgcctctgcctccctcccctttcttgctgggattaaaggcgtgcatcaccaccgcccagcctcccccccctttcttgataacgtttatttgttaaagatgcctcagccacttgctgtgtagttttcccatactggatttggctgaaaacatcttcctggtgtcattctgtctctgtctctctgtcctctacttcctgtagatccaaaggtcagaccaagtgggtatgcagtcaggtcagaagttggcagtcttagttacttgttataagtaccccggggacctcatgtctgtgtccaggttagtcgggtacaaagggaccatctcaccatcatctgataatgtgtaagaagtgctaattcttgtgctccaacacgtggattatggtggctggcgccgatggccgcagctccttctagtttcttctggagatattactgaatggcgagtttccatttcctccatcgagtctgctttttttttttgggagctgtaacttttgtatgaagaagaattttccttctgtcttaagccctggctggctctgaaatacaatctttgtggggaagacaggataaatgtttgatttattctccctattattttttcgttttttattgaggcatagtttacacaggataaaatgcacaaatcttaacttacagctcaatgaattttacatgtgtctacacccatgcatcctccacccaggccaggatgtaaaacacttccagaaccattcctcccacctctgtctggttgatacccagtcccctgcccctcctcacagtataccgtggtatttaaatggtatttatgctgtctctttctctaccacttatttctaatgtaaccaaaatagtcatttattttattcatggtttctgaacttgattttatattaagaattgcattatcctctctaagaggataacatacattctcacatttatacatgcatatggatctataacatacatatcttaaatctctgctccaagtagtctaaatgattatctaattatcgtaacatcatttattgtttttctctatactcctttctgatttgaaatgactttcaatctctattagatttttgtataaacttgtgtctaggcctgagttattcttctgttgaattccttatttctttttcctgtactgcggtgatacaaggtgatataatatgttttattattggcaggacaagccatcccaaatccttaaagtaattgtattttcccacttggacactcactgttcttgctgagttcattcttcgggtgactttcgagtcctgttgttctgcctcatcaatcgggattttggatagggatttacctccactgtgttacggaatcgaatatcacagagcatccgagaacaacctattcagtggatccaggaattccattttggttttctagcaaattccctggtgatgagaatgttcttgaaagatttattttgaaatgttttcatttgtattcttctggaagcatctcgatcacctttctttacattattatataattataaaatgaattacaagattacacaaattaatctttgttttctttttacttcaactcttactaaaacgtcttacttttttaacgtttacctttcagtttattattttgagattttcaagtatctagaaatgtcattttatggtatcttctccaatacagtgaatttacaatgttcttacctggttgcattagctagaaccctgagtaacagggtagtattgacgtgtgctctgttgctcctctatgtactaggcttttctgaaaagtgtctccatggaatagtatgatgttttgtggcgtgtgtgtgtgtgttttcattaaattcaattttaatttatccatttttttttaacctgtgtgaagaagctaagtatgactaaaagctttttggctattgagtgggttaaacataaaatgctttctttttaatgtattaatatggtatttatttaaattaggtccttttcttggggttatccttactaagatatgactatggtttttaaaagggcttttatagattgtgtttgctaagttcttgattaagacttgtttgcactcaaaaattatattgattaaattgttttttagatttatttgtgtgcacgtgtgcatatatgtaacacttggctcaggatgcttatgtagatcagaggtagcttcagggagtttgttctccctttctaccatgtgggtctcagggattgaagtcaggctctcgagattcgcagcaagtaccgttacctgctggcccatttcagcctcccattggattgatttgcagcttttctccattaaagagaaaaggctgctttcggtaccatatttttgttgttccttagaaattataagttttaaaaaaatgtctttgcctcatctcctttgctaagtttctgcactaaatcataaaagccctggctctcccagttcttgtaagcatggcagacagggtttggcaggcggcttcttttggctcctgttttcagaggcgcacaccccagggtcttttaatgccgcttccctttccattttacagcacgagaaaaatcagtcctgtgtttgattttcatctttacacttcaggatacaatctgtacagagcccgtgcatgtagaaagaaagggagtatgttgtccctgtgtgtgatggggaatatccccttggttctgtccctgtgtgtgatggggaatgtccccttggttctgtccctgtgtgtgatggggaatgtccccttggttctgtccctgtgtgtgatggggaatgtccccttggttctgtccctgtgtgtgatggggaatgtccccttggttctgtccctgtgtgtgatggggaatgtccccttggttctgtggctcttactaagatccataggtttggctattaggcagttagcattgtatttttgatttgatatgatgtgctctgttctggggtggggtatggggagaaagtgacagcatcattattgctttttctgctgtgtctgtcgggttttctgcaattaatcctttttgtttctaatcaacctcacctttacgaacacatgtgattgttgtctaagtctttgatgattgtgctgtaggagcacgaagggactaaaaatctttttttttttctgcttacacccaaaaggactattaatgccagcgtagatcccacagctggctgtccttgtcccacgtgtatgtctttctctcacagaccagcttagtacttttgtacactcctttctccctggtttatatcttttgtctccttactggatttttattttattttctatcctttttttctttttaaaattatttttatttattcttccgtcatacattacacggcaactgcagtttccgctcccgctgttcctcacagcctccccattctcttctaccccagatctgctcttcctgtttccctccagtaaagagcagggcttcctgggatatcaactgaacctggataacactaggcacaaagcctcacattccttttcatctcctatttcctctgtcatgtctccatctctgtgctctcttgctactgcagtacaaaatccccagcaaagggctattgggtatgagtagggttagcgtgtgtggagaagagaagctgggctgcagcagacagctttttgggagcaaggaaatgacgggaagttgctggcaaagaaatgcctgcctagtagagcaagtgctgatggagttggaagattgattagggcagaagtcagctctctccacggagtaggcaaatcagagcaagctggatccaaaagctagcagggctcctataccatgtgttgggtgtggcctggatatcagactctgtgccctagtgactgggatctgcattacagggcatactatggacaggaagtcacagaacgtacccctgataagggatcagagttatgcatccttcctcatgtagtgaacgttggagtttctcgaaagtgctggagaagccatcttttgtctccagactccaggttctttcccatcactggtgctaggacttaagagcccaagagattcagtctctcaattaggtttagagttaggtaggagtgagcaaaatccccaggaatgtcaaagaagacccttattgaggtagctttgtgtggaacagacatataaaatcatagctaaacacacgtacacagacacacatagacatttatggacatgtgtgcaggaacatagtctacattagtcaaacacctatgaacttaaggtggtggtgaaagggaacttaccttgctaaatgtgtggttcagaaagaaacggggaccactgaccttggcttacaacttgaagatctgtgggaagaagaaacaaatgaaactcatctccagtgaggtgaggtctgaattgctctgcaggcttagagctggcagcccgggatctgttgttcagctttctgcaaatgtgctggaggccaccaacactatagcttgtatctgcagtgctcagcaagaatggtagaaaccgaatgcctgatgtagccctcccttccttcaggttagctgactctctgagctgggtttgttttcttatccaggggaagcactgttctgccttctgtcctatatgatcaaatatattttttcttttttgatgtgtttattttagactctcttgggtaacagaacaaaggaagatgtttgtacatataattgaatacatgcatatccatttaactatctttacctatgttaaaatattaaggtagcatgagtataaaccaatgcctccaagtctcatccattactctatggataatttcccccctcccctttcctctagcttcacagatctctctcacttccaaagcaagaaccctgtcccctaggcccttagccattcacttgtctaattattcatttccagtatacagagaatagatggtagcttttaaactcttaacctgtgccaccatggaaagatccaatatttttgaggtcccataattgctctgctaggacagatagaacgagtactttgaggataccaagcttgttaagagcaacaaacgttctgatttctcaccaggaggtgaacctttttcaggactcaacaagtatactctgagatggaatagacaagcaactgatacaggaaaagacagtgtaggtcagtcaacaattggccattctttcatcttatcttattaaaacgtctttgccccctttttatacttccttttcactgcctgtaatgtttaatcgcagacattcttgttggcctagcagagggcctcaggctgtcctcatctgcctctgacttgttgacctgatggagacattagtgatagagaatttccctgtccattccacatctttgatctgactggcctgtctctccagtggccatgcttggaaataaagtatgattctggctgcagttgtcgctctcagcttgggaagattctgaaaaactcagactaatccaaagcagctgtcagcgtaaaagagcttagagtacccagatttgcatctgcctggatggtgaaggcatggcaagactgggtcgggccaggcagtagctatatgaacctttctttggaatccccaacttgaaaaggacataatcatgatccttagtctagcacttcaacctctctttgggactaatatggccaaaagaagttacttctgccccaagccgtgccttggagtcatggtctgggctcttcagctgataatcacagctatagcaaaagagctagctcctttgctatgatagtgaccatgtccaaacataacatggggaggaaagggcttgtatttccctcattgaggaagccagggaaggaactcgggcaggaacctggaggcaggagctaaggaagaaagctgcttactggcttgcttcccatggctttgtgtagcctgcttttgtatacaactctgagccaccttcccaagggtagcaccaccagcagggtcctattgatgaagaacatgtccccacagacttgcttccaagtcagtctgatggaagtgttttcttaactgaggttccctctttccagataatctgtcttgtgtcaaactgacaaaaaaaaaaaaaaatgagccagcacagatgcccatcagcatggaaaggtgtaacaaagatgtgagctcttaaagtatcatttaactaactcataatatttataatatcaatttctataaatttaaaataactgtaaatcgttaaagaatttgcgttacttgaatgatgaagcatgaacttttttacacaatgatgccactctctctggtcatctacaacccttgatcagttcagcggatcaataagatggagcatctcgtagcagaaatggaagtagtgagacaggtgtggccacacctctcagtgataccccctggtcacaagaagcttgcatagaaccctctcttggagcctggtttctagaatcatcctaatacctgctcagaacaacccaaacaggaaagtctacgttggttctacatggccaattctttcaagactattctttctattctttcttgccattggcatggagaatggagagatatctaaggagtgaaattattcatggttgcaagctgattctgtctcctttgcatcacttctcatctctacaggagaaaattgcaatcaggagagattaatcagcaatcattgccaagatacaccactgctctaatgttcctgttacgttaacaagagccagagaagcctgaaggtccagctttcctcaagagctccttggctaccatcctccttagttttatgtcaacttgacacaagttagagtcatcagagaggagggagcctcagttgagagaatgcctccatacaccaggctgtaagcaagcctgtagggcatttgcttaattagtgattgaagtgggagggtccagcttgttgtgagtgggactgaccctaggctctggtttctgggtcctataaggaagcaggctgagcaaatcatgggatgcaagctagtaacaggctctatatcagctcctgcttccgggttcctgccctgcttgagttcttgccctcattgaatttgatgataaattgtttcacggaactgttcttggaaaaaaaaaaaaaaaaccaaccaaagaaaaccctcttttctccccaagttgcttttggtcatggtacgtcatcacatcagtaggcaccctgactgtcagtcactgtgcctctgtcacaatggcctgtggacagtgagctggaacatttccttaactaatgattgatgtgggaagctccaactcaatgtggtggtcacacctgggcagatgaacctggactgtataagaaagcatgctgagcaagccctgaagagtaagacagcaagcagctcccttccttgacacctgcgtcagttccatcagtgatgaacagtgacaggaaaatgtaagccaaatagacccttgtcgcttttggtcatgctgctcattacaacaatgtaaggcaactgagcacggcatctttcctggaatgtgactgtccataaagatggcggaatgcagtgaggtccttttcttttgcatgtgaactcttactacattgatgatcgtgaggaaggatgtggagatcctgtgtgtgctcatttccactacagccaagcttctcttcttcgtccattacctttctctgtagctgtgaccctggttacccaagagagcaacttaaggcagggaaggcttaccttggctcactgtttcacaagggtctgctaatcctcactgaacaagagtaaaaaccaaatgctttggtcaaattatgcaagctttatttccggtcacatggggccatctccctgaagcagggcttgagaaaaaggcattgaacatagaaaagagtaggacttctatagcctccaatctgcaaggctaggggtttccaagggatttagattacataggaacttggcggaataacttattagggtggagatcagggtatatagcgtgcggaacatgtcaaattccagaaaataggccacaacatggtcaaatcttaagttttatagaaaatgggaatgaatttattttgacatcataacataatggcttgtaatcttcagatggagtagctcgtccaccagttcagtctgggtctttggggccagtgcacagcttggctttggttgggtgtggcagaggaactgctatacctctcaaaggataggacacatggatgagaacacataaggaacctgggcaaggtatagcccccagagtcacgcccacagtgaggtcttgctccatctaggtccctcatcttgcctttcgacacctccaaacaatgttgtcctattatatatctatcgaggggttaatctgatccttagcgcagagcccctcatgatgtaagcatctcagaagaacccctttgcagacacccctggaggtgtgcttatttcttttctttctttttttttttttccattttttattaggtatttaactcatttacatttccaatgctataccaaaagtcccccatatccacccacccccactcccctgcccacccactccccctttttggccctggtattcccctgtactggggcatataaagtttgcaagtccaatgggcctctctttccagtgatggccgactaggccatcttttgatatatatgcagctagagtcaagagctccggggtactggttagctcataatgttgttccacctatagggttgcagatccctttagctccttggctactttctctagctcctccattgggagccctatgatccatccattagctgactgtgagcatccacttnnnnnnnnnnnnnnnnnnnnnnnnnnnnnnnnnnnnnnnnnnnnnnnnnnnnnnnnnnnnnnnnnnnnnnnnnnnnnnnnnnnnnnnnnnnnnnnnnnnnnnnnnnnnnnnnnnnnnnnnnnnnnnnnnnnnnnnnnnnnnnnnnnnnnnnnnnnnnnnnnnnnnnnnnnnnnnnnnnnnnnnnnnnnnnnnnnnnnnnnnnnnnnnnnnnnnnnnnnnnnnnnnnnnnnnnnnnnnnnnnnnnnnnnnnnnnnnnnnnnnnnnnnnnnnnnnnnnnnnnnnnnnnnnnnnnnnnnnnnnnnnnnnnnnnnnnnnnnnnnnnnnnnnnnnnnnnnnnnnnnnnnnnnnnnnnnnnnnnnnnnnnnnnnnnnnnnnnnnnnnnnnnnnnnnnnnnnnnnnnnnnnnnnnnnnnnnnnnnnnnnnnnnnnnnnnnnnnnnnnnnnnnnnnnnnnnnnnnnnnnnnnnnnnnnnnnnnnnnnnnnnnnnnnnnnnnnnnnnnnnnnnnnnnnnnnnnnnnnnnnnnnnnnnnnnnnnnnnnnnnnnnnnnnnnnnnnnnnnnnnnnnnnnnnnnnnnnnnnnnnnnnnnnnnnnnnnnnnnnnnnnnnnnnnnnnnnnnnnnnnnnnnnnnnnnnnnnnnnnnnnnnnnnnnnnnnnnnnnnnnnnnnnnnnnnnnnnnnnnnnnnnnnnnnnnnnnnnnnnnnnnnnnnnnnnnnnnnnnnnnnnnnnnnnnnnnnnnnnnnnnnnnnnnnnnnnnnnnnnnnnnnnnnnnnnnnnnnnnnnnnnnnnnnnnnnnnnnnnnnnnnnnnnnnnnnnnnnnnnnnnnnnnnnnnnnnnnnnnnnnnnnnnnnnnnnnnnnnnnnnnnnnnnnnnnnnnnnnnnnnnnnnnnnnnnnnnnnnnnnnnnnnnnnnnnnnnnnnnnnnnnnnnnnnnnnnnnnnnnnnnnnnnnnnnnnnnnnnnnnnnnnnnnnnnnnnnnnnnnnnnnnnnnnnnnnnnnnnnnnnnnnnnnnnnnnnnnnnnnnnnnnnnnnnnnnnnnnnnnnnnnnnnnnnnnnnnnnnnnnnnnnnnnnnnnnnnnnnnnnnnnnnnnnnnnnnnnnnnnnnnnnnnnnnnnnnnnnnnnnnnnnnnnnnnnnnnnnnnnnnnnnnnnnnnnnnnnnnnnnnnnnnnnnnnnnnnnnnnnnnnnnnnnnnnnnnnnnnnnnnnnnnnnnnnnnnnnnnnnnnnnnnnnnnnnnnnnnnnnnnnnnnnnnnnnnnnnnnnnnnnnnnnnnnnnnnnnnnnnnnnnnnnnnnnnnnnnnnnnnnnnnnnnnnnnnnnnnnnnnnnnnnnnnnnnnnnnnnnnnnnnnnnnnnnnnnnnnnnnnnnnnnnnnnnnnnnnnnnnnnnnnnnnnnnnnnnnnnnnnnnnnnnnnnnnnnnnnnnnnnnnnnnnnnnnnnnnnnnnnnnnnnnnnnnnnnnnnnnnnnnnnnnnnnnnnnnnnnnnnnnnnnnnnnnnnnnnnnnnnnnnnnnnnnnnnnnnnnnnnnnnnnnnnnnnnnnnnnnnnnnnnnnnnnnnnnnnnnnnnnnnnnnnnnnnnnnnnnnnnnnnnnnnnnnnnnnnnnnnnnnnnnnnnnnnnnnnnnnnnnnnnnnnnnnnnnnnnnnnnnnnnnnnnnnnnnnnnnnnnnnnnnnnnnnnnnnnnnnnnnnnnnnnnnnnnnnnnnnnnnnnnnnnnnnnnnnnnnnnnnnnnnnnnnnnnnnnnnnnnnnnnnnnnnnnnnnnnnnnnnnnnnnnnnnnnnnnnnnnnnnnnnnnnnnnnnnnnnnnnnnnnnnnnnnnnnnnnnnnnnnnnnnnnnnnnnnnnnnnnnnnnnnnnnnnnnnnnnnnnnnnnnnnnnnnnnnnnnnnnnnnnnnnnnnnnnnnnnnnnnnnnnnnnnnnnnnnnnnnnnnnnnnnnnnnnnnnnnnnnnnnnnnnnnnnnnnnnnnnnnnnnnnnnnnnnnnnnnnnnnnnnnnnnnnnnnnnnnnnnnnnnnnnnnnnnnnnnnnnnnnnnnnnnnnnnnnnnnnnnnnnnnnnnnnnnnnnnnnnnnnnnnnnnnnnnnnnnnnnnnnnnnnnnnnnnnnnnnnnnnnnnnnnnnnnnnnnnnnnnnnnnnnnnnnnnnnnnnnnnnnnnnnnnnnnnnnnnnnnnnnnnnnnnnnnnnnnnnnnnnnnnnnnnnnnnnnnnnnnnnnnnnnnnnnnnnnnnnnnnnnnnnnnnnnnnnnnnnnnnnnnnnnnnnnnnnnnnnnnnnnnnnnnnnnnnnnnnnnnnnnnnnnnnnnnnnnnnnnnnnnnnnnnnnnnnnnnnnnnnnnnnnnnnnnnnnnnnnnnnnnnnnnnnnnnnnnnnnnnnnnnnnnnnnnnnnnnnnnnnnnnnnnnnnnnnnnnnnnnnnnnnnnnnnnnnnnnnnnnnnnnnnnnnnnnnnnnnnnnnnnnnnnnnnnnnnnnnnnnnnnnnnnnnnnnnnnnnnnnnnnnnnnnnnnnnnnnnnnnnnnnnnnnnnnnnnnnnnnnnnnnnnnnnnnnnnnnnnnnnnnnnnnnnnnnnnnnnnnnnnnnnnnnnnnnnnnnnnnnnnnnnnnnnnnnnnnnnnnnnnnnnnnnnnnnnnnnnnnnnnnnnnnnnnnnnnnnnnnnnnnnnnnnnnnnnnnnnnnnnnnnnnnnnnnnnnnnnnnnnnnnnnnnnnnnnnnnnnnnnnnnnnnnnnnnnnnnnnnnnnnnnnnnnnnnnnnnnnnnnnnnnnnnnnnnnnnnnnnnnnnnnnnnnnnnnnnnnnnnnnnnnnnnnnnnnnnnnnnnnnnnnnnnnnnnnnnnnnnnnnnnnnnnnnnnnnnnnnnnnnnnnnnnnnnnnnnnnnnnnnnnnnnnnnnnnnnnnnnnnnnnnnnnnnnnnnnnnnnnnnnnnnnnnnnnnnnnnnnnnnnnnnnnnnnnnnnnnnnnnnnnnnnnnnnnnnnnnnnnnnnnnnnnnnnnnnnnnnnnnnnnnnnnnnnnnnnnnnnnnnnnnnnnnnnnnnnnnnnnnnnnnnnnnnnnnnnnnnnnnnnnnnnnnnnnnnnnnnnnnnnnnnnnnnnnnnnnnnnnnnnnnnnnnnnnnnnnnnnnnnnnnnnnnnnnnnnnnnnnnnnnnnnnnnnnnnnnnnnnnnnnnnnnnnnnnnnnnnnnnnnnnnnnnnnnnnnnnnnnnnnnnnnnnnnnnnnnnnnnnnnnnnnnnnnnnnnnnnnnnnnnnnnnnnnnnnnnnnnnnnnnnnnnnnnnnnnnnnnnnnnnnnnnnnnnnnnnnnnnnnnnnnnnnnnnnnnnnnnnnnnnnnnnnnnnnnnnnnnnnnnnnnnnnnnnnnnnnnnnnnnnnnnnnnnnnnnnnnnnnnnnnnnnnnnnnnnnnnnnnnnnnnnnnnnnnnnnnnnnnnnnnnnnnnnnnnnnnnnnnnnnnnnnnnnnnnnnnnnnnnnnnnnnnnnnnnnnnnnnnnnnnnnnnnnnnnnnnnnnnnnnnnnnnnnnnnnnnnnnnnnnnnnnnnnnnnnnnnnnnnnnnnnnnnnnnnnnnnnnnnnnnnnnnnnnnnnnnnnnnnnnnnnnnnnnnnnnnnnnnnnnnnnnnnnnnnnnnnnnnnnnnnnnnnnnnnnnnnnnnnnnnnnnnnnnnnnnnnnnnnnnnnnnnnnnnnnnnnnnnnnnnnnnnnnnnnnnnnnnnnnnnnnnnnnnnnnnnnnnnnnnnnnnnnnnnnnnnnnnnnnnnnnnnnnnnnnnnnnnnnnnnnnnnnnnnnnnnnnnnnnnnnnnnnnnnnnnnnnnnnnnnnnnnnnnnnnnnnnnnnnnnnnnnnnnnnnnnnnnnnnnnnnnnnnnnnnnnnnnnnnnnnnnnnnnnnnnnnnnnnnnnnnnnnnnnnnnnnnnnnnnnnnnnnnnnnnnnnnnnnnnnnnnnnnnnnnnnnnnnnnnnnnnnnnnnnnnnnnnnnnnnnnnnnnnnnnnnnnnnnnnnnnnnnnnnnnnnnnnnnnnnnnnnnnnnnnnnnnnnnnnnnnnnnnnnnnnnnnnnnnnnnnnnnnnnnnnnnnnnnnnnnnnnnnnnnnnnnnnnnnnnnnnnnnnnnnnnnnnnnnnnnnnnnnnnnnnnnnnnnnnnnnnnnnnnnnnnnnnnnnnnnnnnnnnnnnnnnnnnnnnnnnnnnnnnnnnnnnnnnnnnnnnnnnnnnnnnnnnnnnnnnnnnnnnnnnnnnnnnnnnnnnnnnnnnnnnnnnnnnnnnnnnnnnnnnnnnnnnnnnnnnnnnnnnnnnnnnnnnnnnnnnnnnnnnnnnnnnnnnnnnnnnnnnnnnnnnnnnnnnnnnnnnnnnnnnnnnnnnnnnnnnnnnnnnnnnnnnnnnnnnnnnnnnnnnnnnnnnnnnnnnnnnnnnnnnnnnnnnnnnnnnnnnnnnnnnnnnnnnnnnnnnnnnnnnnnnnnnnnnnnnnnnnnnnnnnnnnnnnnnnnnnnnnnnnnnnnnnnnnnnnnnnnnnnnnnnnnnnnnnnnnnnnnnnnnnnnnnnnnnnnnnnnnnnnnnnnnnnnnnnnnnnnnnnnnnnnnnnnnnnnnnnnnnnnnnnnnnnnnnnnnnnnnnnnnnnnnnnnnnnnnnnnnnnnnnnnnnnnnnnnnnnnnnnnnnnnnnnnnnnnnnnnnnnnnnnnnnnnnnnnnnnnnnnnnnnnnnnnnnnnnnnnnnnnnnnnnnnnnnnnnnnnnnnnnnnnnnnnnnnnnnnnnnnnnnnnnnnnnnnnnnnnnnnnnnnnnnnnnnnnnnnnnnnnnnnnnnnnnnnnnnnnnnnnnnnnnnnnnnnnnnnnnnnnnnnnnnnnnnnnnnnnnnnnnnnnnnnnnnnnnnnnnnnnnnnnnnnnnnnnnnnnnnnnnnnnnnnnnnnnnnnnnnnnnnnnnnnnnnnnnnnnnnnnnnnnnnnnnnnnnnnnnnnnnnnnnnnnnnnnnnnnnnnnnnnnnnnnnnnnnnnnnnnnnnnnnnnnnnnnnnnnnnnnnnnnnnnnnnnnnnnnnnnnnnnnnnnnnnnnnnnnnnnnnnnnnnnnnnnnnnnnnnnnnnnnnnnnnnnnnnnnnnnnnnnnnnnnnnnnnnnnnnnnnnnnnnnnnnnnnnnnnnnnnnnnnnnnnnnnnnnnnnnnnnnnnnnnnnnnnnnnnnnnnnnnnnnnnnnnnnnnnnnnnnnnnnnnnnnnnnnnnnnnnnnnnnnnnnnnnnnnnnnnnnnnnnnnnnnnnnnnnnnnnnnnnnnnnnnnnnnnnnnnnnnnnnnnnnnnnnnnnnnnnnnnnnnnnnnnnnnnnnnnnnnnnnnnnnnnnnnnnnnnnnnnnnnnnnnnnnnnnnnnnnnnnnnnnnnnnnnnnnnnnnnnnnnnnnnnnnnnnnnnnnnnnnnnnnnnnnnnnnnnnnnnnnnnnnnnnnnnnnnnnnnnnnnnnnnnnnnnnnnnnnnnnnnnnnnnnnnnnnnnnnnnnnnnnnnnnnnnnnnnnnnnnnnnnnnnnnnnnnnnnnnnnnnnnnnnnnnnnnnnnnnnnnnnnnnnnnnnnnnnnnnnnnnnnnnnnnnnnnnnnnnnnnnnnnnnnnnnnnnnnnnnnnnnnnnnnnnnnnnnnnnnnnnnnnnnnnnnnnnnnnnnnnnnnnnnnnnnnnnnnnnnnnnnnnnnnnnnnnnnnnnnnnnnnnnnnnnnnnnnnnnnnnnnnnnnnnnnnnnnnnnnnnnnnnnnnnnnnnnnnnnnnnnnnnnnnnnnnnnnnnnnnnnnnnnnnnnnnnnnnnnnnnnnnnnnnnnnnnnnnnnnnnnnnnnnnnnnnnnnnnnnnnnnnnnnnnnnnnnnnnnnnnnnnnnnnnnnnnnnnnnnnnnnnnnnnnnnnnnnnnnnnnnnnnnnnnnnnnnnnnnnnnnnnnnnnnnnnnnnnnnnnnnnnnnnnnnnnnnnnnnnnnnnnnnnnnnnnnnnnnnnnnnnnnnnnnnnnnnnnnnnnnnnnnnnnnnnnnnnnnnnnnnnnnnnnnnnnnnnnnnnnnnnnnnnnnnnnnnnnnnnnnnnnnnnnnnnnnnnnnnnnnnnnnnnnnnnnnnnnnnnnnnnnnnnnnnnnnnnnnnnnnnnnnnnnnnnnnnnnnnnnnnnnnnnnnnnnnnnnnnnnnnnnnnnnnnnnnnnnnnnnnnnnnnnnnnnnnnnnnnnnnnnnnnnnnnnnnnnnnnnnnnnnnnnnnnnnnnnnnnnnnnnnnnnnnnnnnnnnnnnnnnnnnnnnnnnnnnnnnnnnnnnnnnnnnnnnnnnnnnnnnnnnnnnnnnnnnnnnnnnnnnnnnnnnnnnnnnnnnnnnnnnnnnnnnnnnnnnnnnnnnnnnnnnnnnnnnnnnnnnnnnnnnnnnnnnnnnnnnnnnnnnnnnnnnnnnnnnnnnnnnnnnnnnnnnnnnnnnnnnnnnnnnnnnnnnnnnnnnnnnnnnnnnnnnnnnnnnnnnnnnnnnnnnnnnnnnnnnnnnnnnnnnnnnnnnnnnnnnnnnnnnnnnnnnnnnnnnnnnnnnnnnnnnnnnnnnnnnnnnnnnnnnnnnnnnnnnnnnnnnnnnnnnnnnnnnnnnnnnnnnnnnnnnnnnnnnnnnnnnnnnnnnnnnnnnnnnnnnnnnnnnnnnnnnnnnnnnnnnnnnnnnnnnnnnnnnnnnnnnnnnnnnnnnnnnnnnnnnnnnnnnnnnnnnnnnnnnnnnnnnnnnnnnnnnnnnnnnnnnnnnnnnnnnnnnnnnnnnnnnnnnnnnnnnnnnnnnnnnnnnnnnnnnnnnnnnnnnnnnnnnnnnnnnnnnnnnnnnnnnnnnnnnnnnnnnnnnnnnnnnnnnnnnnnnnnnnnnnnnnnnnnnnnnnnnnnnnnnnnnnnnnnnnnnnnnnnnnnnnnnnnnnnnnnnnnnnnnnnnnnnnnnnnnnnnnnnnnnnnnnnnnnnnnnnnnnnnnnnnnnnnnnnnnnnnnnnnnnnnnnnnnnnnnnnnnnnnnnnnnnnnnnnnnnnnnnnnnnnnnnnnnnnnnnnnnnnnnnnnnnnnnnnnnnnnnnnnnnnnnnnnnnnnnnnnnnnnnnnnnnnnnnnnnnnnnnnnnnnnnnnnnnnnnnnnnnnnnnnnnnnnnnnnnnnnnnnnnnnnnnnnnnnnnnnnnnnnnnnnnnnnnnnnnnnnnnnnnnnnnnnnnnnnnnnnnnnnnnnnnnnnnnnnnnnnnnnnnnnnnnnnnnnnnnnnnnnnnnnnnnnnnnnnnnnnnnnnnnnnnnnnnnnnnnnnnnnnnnnnnnnnnnnnnnnnnnnnnnnnnnnnnnnnnngagtcccgtgtgggcccttgcgggtgttgggcaagactctgctggcaaggtagcccggggctcgagtcggtgtgcttatttcttaacccaatcaagttagtagccaaattacccatcacaccttgcttcagactaggtcagattctgtcagattctcaactgccttcctttcagctccctggaacacacaatgtagaggttcacagttcttggttatttaattccatttttgacaaacctccccaatgcctttcactttttaaatcaattaccgattcagaatgcctccctaacctatttcattaaaccaccatcttttgatggcctcctctttcaacaacataatttgcctttaataattaatatagaagaattcaaaatgtaatcactgagctcacttgaaggctctttaatcaattaaggacaggtggctttgggacagaggtcttcctcagagcttcacaatccctttgcaacttacttggttctaatagaggccatatttagaatgcatctttgtagaatggcccaggcctgagaagacaaagactggatttcaaatgaacaaggatacacacaattgcttgaaggttcttttacatgaaaataatgccaacatttatggcacagagattaaaatggaaatttttctcaaactaagtccctgtctgagcacggcaaatgaagatgctggtattcagctggctgcccctttcctcttagaattgtcttctgagtcgggggttgggggagcttattaacaaggcttcttggcctgtagtcagtgagagataaggtccaaggtgccccattcacctgcccactccgtgtgggtgacggacacagtgtgaaatttggcaccagaaagatctgagttcaagtcttaaatataacttgatttctacccccaacccttgtgtgtgtgtgtgtgtgtgtgtgtgtgtccatgcactcatgggtgtgtttatgtatgcagatgtggaggccagaaatctactttgagagtcattccttggaatctatccaacctttcttgtatttgagacagagcctctctctgggacctactatttgctgactaggctggctggccagcaagccccggggatttctctattttggtcttctgggttctgggatttcaagttcagttctctgtactcagctttttcatgggtattggggattgaactcgagtcttcaaacattcagagcaagcattttctcagctcggctatttctccagccctgagcctttagttctttatttataaaatcagggtactcatttgctcataatccactttctcttatgacaggacagggtcttggtagctagttggcagacaatgactatgtaggtgattgttatgcacacatggtggagtacctcttggagttggatcatggtgtttgcttcatttctaggtgatttatcgttggaattatgttttgtgcgagtgctcattaagtctagtctgaatacgggctgactgatgaacaagctgggggttagatgcgtggccagggggaacctgcccaggattcatctctggcctctggtatttctcaaaagagacaaagccagtgtggcggtgttgccagcttgttgtgtgtgcagaatctaatttatagctgaccagggtctctagagaatcacacatgtttatatcattaccaaatggtaattgattacaaagctccgttgtaaaatttacaattattgaattactccatgttctctcataaatttcaaatctttatttctaaaagtcaattgatattcagcccaataaatatttaatttagatgtaataatggcgttagagccaaattaaattctcatttagaacataagaatgacctggagagagccagggaggggaggcgtggcagggcagggcaggagatggttctcacagtgtccattccccttgatgggaagagacgtctcacatggacttctctaactccgttttcttctgaaatttctgttcgtgggaaataagagtcttctctggaaataagagtcctctctgttttttgtggggctttgtatttcattctctgaactgttcaatagtcatggctcttcaaggccttatgaaaaattacagcacactgttttctccttgctttatcgatagatgggggaactgaggttcagagagctgaagtgactcacaagaggcgatgttacaagagaggaaggctagcctttgtctactggctggtctatcagtaggctcacagggtctgttaatagccacagagtaggtggggttatgatcctctacatacaggaagcctcaatataacagttctaaacaagatgggcatggctccctcttcttataaaatttgtcaaaagggagggactccacctgcccccatagggttacaaagttgaaagagtcccagcctcctttcaggtttcttgtctattatttagagtttgtggctctgaactttatggtctgaggcaggtgcttgagtttcaagcattgcatgtgcagtggggagggcgaaagaagccatagagaaggccaccttcctcctccttcaatgtttatttattctgtgtttgcatatgtgcatattccacggtatgcatgtggcggtcagagggcaacccgtaggaattggttctcctaccatgtgggttccgggaatcgaactcaggtcatcaggcttaacagcaagcacctttaccagctgggccctgtatcacccctcttttaggaagatttccattttgtatctctgtatgtcttattgcttagaacataattatgtgtgcatatatcaaactgtaagatccaccaagctgtcttaatctgagaaatagggtctggttaaaaactggaatttttatctttcaggaaaagaaaaatagattcgagagtactgctctctgggttctcaccagcagaggtgccacagggtccccccacccccagccttgcagccttgcagctctctaagatgcagtggtctatgccagcacagaggccaagtgaaaatgggagttgacagcctgtttggtgtctgccagacattgggccaggcaatccctttgcatacagagagaagcaaggcatgttgctctctttcagacagcggcacttaaagtgtagcccttggactagcatcagggacatcgtcacctgggaccttatgagaaatgtaaattctctggctccttctcagcgtcttggatcaggcacttcttttttttttttttttttttttttttgggtatcattttcttgacagggtttctctgtgtaaccctggctaacctggacctcactctgtagaccaggctggcctcaaactcagcacccagcccaagaactgtgttttaataaaaatcccatggtagattctgaagccggtagaagttgcaaattctaatctatggctcttacaataaacgagaagtagtacaaggtttagagcccccgcccccaacttatgtctaaattctgattctctcagttagtagctttgctgggttggtcaagttattcaggttatctgacacctcagtgcagtgtcttcatgttatgaggttgacatgagctgacaggatacttagcacgtagtgctcagtgaatgacgattccattatccttataagcctcaccgtgggtgacatcgccatcaggaaagatcaagggaaataatatccccatatcagtattgtggtggtttgaatgagaacggctcccacaggctcccttatttgaaggcttggtcatcgcggagtggcactacttgagagggattagaaggagtggccttgttggaataagtgtgtcagtgggaataggcttccgggtttcaaaagcccaagctagtccccatgtgtgtgtgtgtctccgcttcgtgcagatccagatgtagaactctcagctatttctccagcacctcgtctgcctgcatgccaccgtgctccctactgtgatgaaaaaggtctaaacctctgaaactatgagcaagcctcagttaaagtgcttccttttgtaacagtagctgtgttcatggtgtcttctcacaacaagaaagcacagctaagacaagcatgcaacagaaatccaaagatatttttaagtgtgtgtgtgtgtgtgtgtgtgtgtgtgtgtgtgtgtgtgtgtgattgtgcatgcacacgctgcaggagatcagagtaccctatgtgttgtgttggtcctggccttctaccttcttgaagacaggttgtttgttgctgtgtacctcatgatagctggcccgtgggattcttctgtctctactgtccatctccttagacaagctagggtgacagatgtacattctataatgcgttctgaattttcagggtccccactcttgtctccataggtaggtgtgtgctttacctactgagccatctcctcagccaccaagaagaaatttatattttgcttcaaaatctctactgtttttttaattcttcctgtgagttcttcctgtcttgctagagataatcaagaactgcctttaaaatgtaaagtgttttaagaatcttaaaaaagcatttaccagagaggacattcagatggatactgtgcatatgcaaatgcgccgaatctcattagtcaccaagaagcagaaattaaagctacaaaaaaattatcccgtgcatccaccagattcattaaatgataagggtaggatgccaaatgttggggcagacatggggcagctgaaattccataagctgcgactgcaagcataaacttagcaagcctaataagctaaatccatgcatcttttatgaagagccacctcttgctttgatgtataggtaagctgaggtggtcaagctccgtttctcatcgccacctgcgtgatgctcgcagcattatttgtaagactgaagcccagaaaccactcagaagttccctgtaggatagttaatttgtgatttactcatgcaaaagacactctccagccaagataatgaatggctcagtataacgaaatgggcttttcttagtcaacttggacgtgagaaggcaggcacaggggacaagatggtatatggtcccacaaatgcatatttcagacacaagcaaaacagtcttcagtgtggaagtcaggatgctcattaccttggggttgggtattgaatgaatatccctacggtgatactgacaatattctattttttttttttgattgggttggagatgatcatagtgtgtttctgaaaatttagtaagcgttttatgtttttatacttttgtgtatgtatgttgatacacatcaatacactatttcagcacaaaagcttacttgaaatatcgatgcaataacatctaaaatgtttatagaaaaatggaaaagcgtgattgagggaagtcagagaattggcaggagctgggagaacatgtcagtcatttacacggatgctgtgactccccgttgctgagcggctgagtaagacaaggatcacatatacagaacaacacacacacacacacacacacacacacacacacacacacacacacacacccctcttttccattacagaagtaaaatgcaacgttcagggcaaccattccttaacatctagtcctggatggaaatgagagggagggaggtacccacgtgtcagttctggaagccaacgtaggcaaaccctttagacaattgggtttgtgattttcattattttctcattaggtcactacgcatctctgatggctgttgagggcacagctactagtcttagctgagggatgaggagggtattaagccagggggagttttctaatgttggttacccttctcaacacggtcttgctggggatgtaagcctggctctcctggtgcctggttttccgatatcgctatttagtctgtggagcatttttgaacttggaagaaacactccactgttccatgtcggatactgggaaaactgtgcaggactcggtggatatcctgtaaatggcatcaccataggatccgtaagagtagaggcaaaggtttttttgtttgtttgcttttgtttttttgttttgttttgttttgtttgttttttcctagtaaaaagccactgaaaagtccgacaatggaaccaggaaccaggagattccttttcattcttcagggcttataaaacaggacagaattcaccatcaccctagttcttggggggatttctcagaacattcagagagcattgctttagctttctaaagggttgtaggggtggcctgtagtcaaggaagataaacagatacttccttggttctagaagatggactgttacttgtatgatactattttgtgagtaaattataaaggacctaggatagaatagtgggagagagagagtagaaaataatttgttaaaaggttgcttttaatgagttagtcagattggaaaagtcaaagatgtatattgaatgatctgggaaacatccaaattgcttgtcatccccaggtcatggggacttcagtttatacacttaatatacctggtaatcagggccccactttcattactatgttgagcccagggttatcaaaaacataatgagtattttctactctcattgcaaatgtatgaacattattttatttgttttacatgttctcatgcatctatgtatatatgcatgctcttatgtaggcacatatgtgtgtgggtgcatgtccacacatgcacacaggtatttgcagtcctgcagtagacatcgggtgtcttccatggtcactctcccctctgttcgttgaggcaaggtctctctctgcgcccagagcttcaggttctggctagtccaggtaggcagcttgcactggagacctcttgtctctgctccctaagtgctggcatggcaggagggtgcggtgcctgcccagcttttacatgggtaccagggaacttaactcctgtttcttgcctgcatggcaaatgttctatccactgatccatctccctagtgccagaacattacttttgatagttgtatctaaatctgttcaaccttccctttaatattgggtgtttaacctgcttctggtatttcatacgatggaccttaacaaacaccatgctcaaaaatttgaattcgtcactaatgatttccttagacacatctgacattttaagaatgaaagctggcatcctctctctctctctctttctttctttcttcccttctctctctttccttcttttcccnnnnnnnnnnnnnnnnnnnntccctccctccctccctcccttctaaccactgcagcctagcttctgttatgaagcttgaaaatgcctgagtcagaatctacatagactcatttgggatcctggtttcaccgtctaccagctgtgtaatcttggatggatgcctctgctcagaaaacctcagtatccctatcagtaaaatgggaactcaattttccagtccattgacctataaagatggttaactgagaaaccgatgaggaagcatcatttaaacccccctttgcccaagaaggtgtgagacatttccttggatttcttggaggtgtgacaggtagtttggacacactggggatctacctttggaacaacttcaggctttgttctaaagcaaggacagcataggtcaagagaatttcaccttctctgaaagtcaacctgagattttagtttttttcttgagcttattcgagagctttagagaaatgcatattcatccctttagataaaggatcaacaaaatatgacccaggggccagatccactttgcctcctgcttttgtgagttacattttattagaattcagccttgtgccactgttgtgaaagcagcaagctaacaaatacttattttatggccttctccagaaaaaaaagtttgctgactcctgcttcagatcaaccataaaatatttatttctgagatcaccagacataaatgcattacacttccaaaaccactcccctcccccaaccctgtgatagaaggcaggaccaagctgagttggctctgtcatgtgtggatgctacatagtgtcataaaaggaggaaggtgtgactctcagaagagggcactccgtttgattgacatattggtctttccagatcttcttggatacaatctgcaggttgcccttccatgagaacaatgcctgccatcatttaggttgaagcttcaatgagaatgtatttgtcatgagagtgcaagcctcagtttctgatcttgatagtaaaacaaacctagtttcttataattggctttggatcagaatgccttggacttggcttagagaatggtgtattgtagtgttcctttggtgtaggggtagaggtgggggtgaggctgactcttgtcttctctcaacacctttccatatatggaacatatctctttagtctatgtcatcctcatttgaaaatgctgcaaacttacgttttgaagattaattttaagtcgtgtatttgtatgtatgtatgtatgtatgtatgtatgttggtccatggtgtgtgtgtgtggggggggtatgtgcacttgagtgcaggtgctcatggaggccagaagagggcaccagatcctgcagaactggagttacatgggttgtgagcgtccctgtccatgggtactgggaactgaattcatgtcctctgcaaaaacactatgtactcttatcactgagccttctctctagctgccaaaattatgtgttggaaaggaaacttgagcaagattcaaagggatagttctgtcttgatttttggatggcagagaacaggagatagtgggtgacctttgtctccagatagccattagattacatagatccctgctatttatttcctgttgggtcattggtgagaatagtgaataagtagtatgtccaggcatagtgctgtatattagaactaaatcatgagagttaaatttggggggtaaacattgtgtaagcatggacttcaaaagtgtatgcaactggcttaaagtctttcatgatagaataggtttaatggtagatggtagtcatcaattcctgtttcctccctctagccatgtgactctgtatttcattccagaggagatggagcacatctctctacccagtgtgttggcatcatccccattacttacctaagccagcaccatgcctatggaggtatctgtacccaacctaggaagcagcatgtgtttctgctggtatcttgtcctttggttactaccttaaaatgatcagactcacctagttcaccccaaggaggactagggtcaagtgagccagatttgaagcccaagcaaagccttgatggaccactactagaccactggcgtctggatatctttgttcagatttataatgtgttctcgtcactgaggtcgggctagtgttttgtgtgacaagttacacgattcaatatgtattaattcacatggagttcatggttgatgggttttctattttgctttgttttctttttcatttattttatatgtatgggcattttgcctgcacgtatatttgtgcaccacatgcatacgtgatgcctgtggagaccaaatgagggtatctgatcctctagaactggagctacagatggttgtgggccactgtgtggtgccaggaattggaccctggtcctctggaagaacagcaagtgctattgaccatttcttcccatgcaggtaggtctggtactcagctggtgggctttggtgcagtcttctattctgtttttaattttgtgacattgatattagtcttgtttaatgaacattgtccaaggaaagaccatgagtgatttactctcctgatctcattccattccttatctgtgtgctctggtttataatccatcttaacacctagtggcctccatcctaccaggggcatctgagagctaatggctttgtagacattgagattcttgattctacagggtctgctctgcgattaacatgctatgattgtatggggccagctgctagatgtactcaaccagaaatgcaactctttggtagctctatttgaccaggtcaatagttgtgtgtgtggcactaattaggccaaagttgtgagttctgtcccttgacaaggaccaattccagtcatggtttggaattcatttcccaaaggcaaaggtttcagccagcacccagagttggtgttaagtgggaaatggagattaaagtggcctcagaactgctttgagaaccaacctgtggttgccacaactgttgagtgtgctgtgctatgttgagggatgtatagatgatgtcctcaagttctgctcttgaagaagagaaaagcaaggttcagtggttcactcaggcagttgcttataatagagcgatgacagtacttgcccagacagacccacaggtcgtcctgttgtcagcctgggttgcttattcttggattacacaggaaatagaattgggatttggggttaggaagctcttcttatgagagcctattctatgctgtgtgggacacttagcagaatgtatgtcttctctctatactccttttctaggtaagaaggcccagcatgtttctagacattgccaagatgagcttgtgccctgaatgagaactatgattaatggtgtaattggtagtccaatgagaggaacctggtccagagtgggaacctccaaaccacaactcatttggagattggttttaagtgccttggtatcttctgaccttgcttaggctatatacacaaggaagaccttggtcctcaattggaccatgtttggttcttctgattttcttggtagcttgtatatcctgccaccttcttagcttatggagggcagtgatgtggtaactgggtatcccctcctagaccacatcctcaggcactggctccatgagagagcaacttaggagggagttgagggaggggagaagtactccagagaggagaaattcaccatcatgggtgttgattcgtcatcaccacacacctacacacacacacacacacacacacacacacacacacacactgacgtgctgttctgcccaaaacccactcaacagagtgcctggcatatgggtaatgcttaataaatgctggctattattactgttattattaatgctatttataaccacaactcttttttgtaaaataaataaataagtagatttgggaataacactccccaaggcttccgcactattagtattcaacttatttaaatttaatttttgcaaggtcctgtgtttaattttaaaaaacccagtgaattattagtattttaatgactaatgacacttaataaataacactggcaagggctcaaatagggtgccatttaatgtaatgttctacctatgttttctcaagaaagggacagggaaaaacaatgcttacagaaagttgcacaccaggaccaaatgttctctataatttgaatttcttgccttgtgattagtgaggtaaatagccttatcgtgtccctgagtctatgtatcttatagggagaatgctcagctaatattaatttcccttagatcttacagagtgtgtattatgtgctgttgtgttataagagttttagagatattaattcattaatccttgtaagaaccatgtaaggcagcaactagtttatttctagaagaggaaactgaggcatagaaaatgtgtctgcttgaggcgcgtgacgagggaatgcacagcaggtggttttagtacgtggctttataacccattgttcaccttacctcttcaggtgacaggtaggacctggactaggaaatggtttccagccttcctgaggtgctagggaacagcagtgacacacatcaagcaggcgtgtctcacattagatcttggaggcaggaaagagtgtcacaccgagagcaatctaatttgttatattacagaggaagaaccaaaatgcccctgtgtacacagtccatcttccatgaggcttggtcatgtgttcaccgagtctctggtttggagcacaaagcccttgacatgactatgtacatacaagcttttgatgtctgtaaaaatgcaaatcataaaaggtatgcatgtacaatatgatgggatagtttcacactttactgtagtatgtctaacaaaacctctatctataaaacaggggttatcacaggcctggaatttgccaattaaggctaggctggaagacccacgagccccacggatctgcctgtctctgcctcgccagctctgggattgcaaatgtccaccaccctgctgggctcttttatgtcagttttgggaatcagcctgaggtcctaacgcatgtctagtaagcattttacccactaagcatcttcgcagcccagtgcatattctttcttaaataagagtttctgaaatgttgattgttgtttcagttatgaaagggacattcctaccgaggctgtgggaatacttccctggttgccaaactttgctccagcagtaattccatgccttccatcctcgatctgaggctttgtatctatctctcagcataggtgagttttccctcagtgggcataatgttgggacacagttcctcttcctctgcctcctgtacctcaccatccgaggcttgtcagagacagcacgaaaccctgtccaggccatgtcactgaccttgatactattttgggcttttctggtggtgacagctctcaaccctgtcagacagagatggtagatgagccaagtacttaggaaaactgttatcaaattaaaacccaagcaggatccaatgtgagctctgtctataaataacttatgaaaagtgaaaagatgtttctgttagcaaatttaaaataatcgttagaatccttcaacagattgctgctaattagattgagaattaaacagctttgtatgagcgtagagttaattaatagctcattacttttttaataagccaaattcatttggaaacagaagagagacggcaaagttcatcatggatgagacgttagattgggattatttctccttcccttgatgagagaaggagtttaattaaagcaggggacacatttgtatcacgaacgagttgcgtgcgatctctagtacttggggctggagaaatcagcgactctcctcatttaaaaagcctccttgggatctacagggttaatataagttatgctcaacatctgttcagctcttgggttcttcaattcactgatcaagccaaaactttttgaagctgggcagattcattcaaactcgtagacatttattgtagtccatactggttttatttccatcccatttttgtccaggtacactagggtctccctttgaaggctaggctccattttcctgactccctcacttccccaattctatctttctacatagtctcaattctcattatttctttatctggtttcctgacccttcagtgccctttatattacaaaacatggggcagaatggaaataacgaattgaatgcctttaggattttgaagccaagtgcattctgggtatgctataggacactctccattccattctttcagagcatcaaggtgccctgtgtctacagtatgttttcttccatcagttattctcgacacacttcagagattaggtatatgaatttgactttcagggtgtgtgtgtttgttgaagtatagtttccacaatttttttttttttttttttttttgcctattcaactcaatgaaagccatcccttgtttttgagtgaagtagataaatagatgttgcctagctataagccacatggataaacaacacttccaacactgagcctagatttttgctaagtctattgagttcctttgcctgcctattggggacttctcaatggcaataggaaggaattggaaagaaaatgcttttgtctagggacatattaaatatctgtctactgaaaagatgaagtctctcttatatctgaaccatgacatgtacatatggttttcattactgttctgctatttatttatttatttgtttgtttgtttgtttgtttgtttatatatatttattaatgctttgcctgcatgtatgtctgtgtgagaatgtcagattccctggaactggaattacagacagttgtgagctaccatgtgggtacggggaattgaaccgaggacatttggaagaacggccaatgctcttcttctctgagccatggttaccttttgattgaaactgtggttgattgctcagcatgcccatctggtaactataacccatttcaaggactgtatagacgttacagagaagagctgctgggctctgatgcagttttatgctgtggtattgaggcatcccaggactaattagaataccctgtttcttaaaaggtgatccaggctcagagggatcaagggtacaaatctcttctgagaaattttcttttcttccctttccaaatcaggacgtaggctctccagttctctgctcttcactagattattaattcacttttgaaaagagctctattgtttacaccagaacccagatttccaggaaagaatcaaaataagtggacacataagttctctaacaggtctttcctggacactcttcctgccaaaggtaagtgtttagtcctaacttgggagccgagttttaaaattatcaactcgttttattcactttcctgatctcctttcaagagcatcccgttgttcatgggctaaaagtgaaatgttttactctcctgtgtcacatcttgcttttgttcacacccacttgctccgtgctcttctgctacctgatttagccctgctggtgtccctgaaaacttctagaacattccaaatttgttttcagccccagaacctttgtaaatgctgggtcctctgtctataagtgttgtttctctaaatctcatcttcattacaggtcttgttcttaatcgtgactgctgaagtgagttctcctatgcttgcctaacctaaacttgacttttctcttggtctcttatatgaaataattcttatttccctcttatattcccctatatatcttctgtattcccctatatatcccctctattcccctgtatattttctcctatataaattcccctgtaattgtctggttttgtaaaaaggggattgtttgtttgtttgttttttttttttctttttcacttgaacatatatacagtgaaagcagggaccacatctgacctgcccaggtccacatcctcagccccaggtacagtagaaggaaagtaagacctaatgaaaaagtaaacactgactgtagatttcaaagccagcaggaccaaaggccagggatgaactcagagcctacaattgatggctcagggccaaggtgaagtcttgtggtctgagactggtggacaccagtggttgctgacccttaggtgttcttctgacccaatatctagcatatctgggacagtatactttccatctgagtcatttacaggaacactaagtcccacatccatgtagatattgagaggcatccaactgcagtctcttcgtctatagtcttcttcccttaggatgaactctggcccctttcctattttgtctggataggataggttgcatgactacattctgctacttgtttctttctcatggatttattgagtactggagtgaagagatacagctaagaaaggaaaagaggggtgagggtttgggtaagggtgtgctctcgccagtccaagtgtagacatggcaggcagcatttatccttttctgggacgtaggtagattgctactggaggcaacactgggccagtgcattccttattactttaaaatagaggctcagagagaatatggctcttcacatcttttaaaaggcgtttttagatttcaggccctggagactcttttatgattgtccaagggcagagctcagagcagtgatttgaacgccctgaaatactggggctgcagagacatttccttagtttctcctactgtagctccagcaccttccgtgcatgggtctccatgcagttccaggaagactgggggctttgagtttgaaatgttcttgtaaacagagaagggaagcttaggtttagaagccccttatggggacagattcctttcctcctcaatcctggttctcaagtctttgggttcattttgctgcatgactatcttctatggctgtataaggagttatctaagatggagtgactctggagcatgcgtggtggttgcctctcatgattttgtgtgctcatttgactgagtggcacaggtccatctccaggtctgttatgagacagtgtcagggcatattaggactggaggcatctgaaggcctgatgggccggaaggtcaaggtggctgctccctacggcagcagtccatgttagacgtgagcttagtgcttagcggtgacagtcgtccgatggatggaggagcattgaggccacactgctgggcaaggcatacacaggacactcttctgtattctgactctggggaggtggaaggtctgaggctagccaggactacacagtgaggccatggctcagacaaacccacacgagtgatgacaaatcacattgtggaagaccctgtggagaaggagctagtgctgtagccatttttgtggagctcactatatatctggttcccatattctccctgacattattattgatgattctctgtgctgaggatttgtccaccatgaaatcattttaacatttaaaaagtgttacagagtccaatatatcagatcaagatgccactcgtttagactgtggtatgtgcacgcgcacgcgcgcgcacacacaccacacacacacacacacacacagagtcacacccacagtcagacacctgtacacacatattcctttccctccccctcctccctccctcccattccccccttctctctctttctctctctcaaatacacacacacacacacacacgcacacacacagacccacaaacatacacataatctcagacacatgtacagacacattccctctccttcccccactccaggtattcttcaacccctatagccaccatccaggtattgaaattttgaggcccctccttcccttcctgtgtttgggaagtcctcatgtgtacacctggtttaattttggctgctgtagcataattataactgctggatcgatccttttggctgagaacaaagtgcccattaacagggctagctccatgtgcctattgagacgttaaccagagagcactgttaaatggctgccgtttttcatcttttgtgacaacatttattctggcattccctccaccctgtggaagatggtgccttgtattttgttttgttcttttaagtggagcgcgtggagtcttggcttgtattacctctttagttttcaggggagattagtcaagtaagttggtagatgcatgtttttcttccatcccttgctgcctttttctttcagcaaacttttctaaaggtgatgaatagcaggcaagatgaaatgtccaccctctgcagactggctgtctcctgcatgcccccagctgcatagcaatccgaggctcttttctcccttattcaacactgcctggaagtttcgcatactttttttgaaatcttcatttcccttgaacattctttgaagaaatcagcatcctgttgtccacgccctcccccccatttaagtcgaaatagaaatgtttacagtattaagtatacttactattcagtttagatttcattgtcccccatatgttatgttccacactggcagaattctgggtgggaaagcattaaccctttacttggattctgaaattttgcacagcagttggacttggaaagcatgagctgcagaggatcttgggaagctcagcctaaaccctgagttttgcagagaagttcagagaaagaaggtggttttctcagagtagaccagcagtttaacggctgtctgaggccagagcagagactcttggatgtcttggttatactgcttggctggtctggtctagattctcactggcttgcctagacccaattgtccacctctttctccctgtatccttgtgaagggaagagcttagggcaccaaacagtgagtgagtccgtggcccccatgacacaaaagggaaaccctgaaagctgactttaactgaaatcttggtgaaagttccatgccctattatttgatacttatattcccctaccctttgcatcctagatgtgcatcttcggggtcattcatcttgtttgcaggagacagcatctctcattggcctggaacttgctgtgtttggctagagtggctgatcacccagccagccatggggatcatccccctgtctctatctccccagggctggaagtatatgtgtgtgccaccatgtctgctctggcttcttctgtgggttctgtgggttctggggactgaggtcggtccctcctgcttgtatggcaagcatcttgcccactgagccatctcagagctcagcccctttgtgttttgtaagggctacaacacggagtacttgttttacgcagggacctctgaggaaaggcagaggaaagaatggagtcaagtcaagactgagcggttgagttggcacagatgttgatcttctggaggggtacagggaccagataaaggaaaagctaaaagcattgagtctcgtctgtagagagcagtgtgtcaactcagcatgtctcagattccatgctggtttgtgagaactgagatggaggcacgcgcgcacgcgtgtgcacacacacacacacacacacacacacacacacacacacacacacacacacggggtgttactgatcagcacatttgaggcaggctggaaatcttcatttctagcatgctctactacagccttgttctccaccctccttttgggcagcctagccaacactggtcactctgctgagtgtgtgggaggccagctgcaccacccttcccatgcctcatttttcttcttggtaagagagcctaggaaagtcgcaccccattggatattttgacctcataatggtcaggtacttgcggacaatatcccacgtgagacaccattgaagaatgacttgaggtaggatgtaattaagtccttagcaaccactgcatccctcattgggcatctgcgggagtgcttatctgttcagtactcacagaagccctgcaaggtagatactgttatgttacccacgtttgcaagcgagggaaataacttggtgagtcatggagctgggattagatacagtctgtctgtctgttgtgacatgacgcaactattttagaagtctgcagagtcaaaatgtctccagcatcagtgacatgggtgataatgggtcttgtgtactgagcacctattctttgcctcaggccacgttaaatattttacatttcacccatattaatgtcctgaggtgaaggtgaaggtagatgtttttgtttgtcacgaactataggagctcaagagttccgttcgctgtctgatgtcatgctcagtaagtggcaatgctgggctatgaacctgagtgggatcagctcaaagcctgtgctccaggctgctctgttacattggctggctggttcacacatctcccaacactgtcacctgacatttcaggtagtattcttgtggttggtgtcactggagacttgggaaacaatggcattttgtgaggagcagagatggatttgatatgaacatggtgcataactctactgactgtaagtatcatttgggcttatctcaaaggctctaggaaacttctgaaaaatctgtcccttacttttgcagggtaaccacacctattaaaatcaatggatcaatgaactaagaaattatctaattagttaattgattagttagaatgtgttgtgtgtatgttggtggcatgagtgtgcccaggcagaagataacttataagaagtagctctcttcttctaccacgtgtgttctgcagatcaaacccaggttgttaggattggcagcaagtaccttcacccctgagccatccctctacctccagcagtgaatagttttgatataagatttgcaccatccaggaactttctcgagagcacagatccctgctgtctgtacagtcttgggttttcctttgtccaaggctgctttctggctccgttgggtgtctaagaatatgggaggtagtgtggcagtgggcttagaggaggacgactatgggctaggctccaccctttgtagagctcatgggtcacattaccattgtggaccacctgctggggaggtgtaggacctgccagcatttgcaggaggacatgaggacttgtgggactagtggttgtctaggctgtcttgggtaggtggtgataagggcttgcctagcccaaagagctggtgttcatttctgtctttgctttcactcagtcctgatggagagctcttcctcctgtcttacttcccagtggtcacggcctgcttttatcttccttctgcttctatatcattttcttgttttcctctgtgttttagttctctgtccccataaccctcagcacaccacaggagaagcatttaggtggggatagtttactcttggggatcccaagcgaggaaaggcctgtggggaatcagggttagtgagtgggcttctaaaaggagcagcattctcctgggaagcttgagacagactgtcaaactcagcccgtaattgcccatcaagggacaaggcagctggggtaaccacccctaaagtcatttctagtctcttctgtcctcatagcaacaggatgctgtcataccaagtaatggaggtcaggagctttctgcaggcgctggcctctaaggagatacgaggggacaaggtggcccctgtgtgctggctatggtgctcagccccctctcctatgacacatctgtctggatgttgacatgagaaagcgttttgttagatttatgaaaaacataccacatttcttagtcccagtgtggaaattaggtcagctgaatattttatttccccaaattaattacacacatttaaaaaattgtctggagtctcataagtgtgtgtgtgtgtgtccttcaatgaaatgctgattttccaagtttgagaacagtaaatgcctaatctttaaaaaaatatttgtttttattttatgtgtatgactatgagtatgaatgttttgctttccacatatgtctggccaccacgtacatgcagaacatgctaaggccagaagaggggtcagatgctctggaactggagtcagacatgactgcgagctaccatgtgggtgctaggaattgagcctgggtcctctggagagcagtcagtgctcttagccactgagccttctctgcagccacgatagaggtataatctgaaacacttagtctataacttgctttttttttgttctggaggtttgcccctaatggccatgagaggaactgatggtccagggtaacttcaccttgcatcagcttgtgtttttttccttgttggatagatccatactgtcttgaacctctgggatgattctacaagattcacatgagatcctaagtctgctctggtagcagtctcttccctcctggggtcaaacaagcaacaaaaactaaaggagttgggattctttagtgacacagtttgtcctgagactttcgtggtgggtggtatgcattgtgatttcctggtggcacagctgcctgggagtcaacttcactcccaataatctcactgggttatcaggctgtacttgggcagatttttttttcctgttgctgtcttctctatctggggtgaataaactactcattacatcttgtcagaagtctcatagcacgttggcatccaaattgagtaatcaggcaaagaattgcaaatctttccctatgtcctctgcccctcctaaagtctatttttgtatggaccacataggtcaggaactcaaggtttagcctgtcttggaacttttctgacaaagtatttgacaataacctaattttgtgggtttcttttttggggtgggagggtggggtttatcacctgcctgggctgaataatttaccacattatcctatttttgacattagagctatacattagaatttccattttacagttcagggagactggggttagaaagtcagtgcagctttgcctcctggagtacagtgaagcgtggagcttcagtctgaagctcccccagagcctccagggccaagggctcagctctaatgcactgccatgtaccctgcactgaagctgaccgccattaggaggtgcccactggcttccatcgggaagtgatctctgcacatttcccctggaactgattcccagaaaaccccaggcagcccacttttcaccccactgttggtgagaaactggggtttagagaatcggagcgctcttatcttgcgtgtcgttcagaggtgatggatagctgactgaattatttgctttgcctgggaatttcagggcaaagcaccttaactaatgcaaatctcatcccaatacatatgaatgcacgtgaatacacacactatcacagtcatatgcatgtgccactttcctgtttagctccccactctgtttctttgtggctgtctggacaggccctattagtgtttttatgtcatctgtccttgtctggtgaggtgtccatcacttcattagctctggcaaggccaggtctggggataagatccctgctggtcctggattttagcacagagtctgctatgaaagagatattctaaggctgggatacaaggatgagactggaagagtatatgggtgcatttccaggcatgggggagacttcagattctatttcacggttcatagttttgaaggaacttaagctcaccccatagtaattgctcttttaatttgcagataaacctgggagttgcctgtgtttattgtagcttttacattgacccagtgcagtgagtttccattctaactgcattgggaaaactgaaggcagtgtccttgcacgtagatacttgtagatcttccttctgaggtcaaagcaaccaatacacattgcgtcccgactgtcgccggctacctgcgatgtctgtgagagcatccaaggcaaatacatcatagcgcatgacctttaggtacctgagggcaagcagaaaagaagcctcatacaggagtagggccctaggaggacgaatgaactactgaggatagcatcttccatgccaacggttgccgagggggatgtgcaggtgggtggagagctgtgtgcgatgtgcctgcggggatggcttcaatgggtgtgagtaatcagggagatttttagaaagaagtagaggcccgtgtgtgctggagacagttgggatttgggacatgctaatatcaatgtgaagattgggcggtagcgttaggatattttctgagttacctgtggatgtcctgggcagacaggactgtctgtgtgaagcaatatacctacccaccttcttacaggacctgagcctggagcaaggaaggggtccttgagagcatcagacgagtgggctagtgtgtattggggcgctcaacctatctccctgcttgatatgtgtgctttataaaactccaacccacactccttccactgaaacacacagctcatcattactgacttgctatcatttcggggtgttgtgtcattcaaagatgctggtcctgaaatgatttcatgaacaacaagattccacacaaggcagggagtcattgttctttttctccggaccctgtccctctactcacgaaacaaaaccttgtcactattatgatggagaaatgtctagatgtgtgagtgaccaaggaaaggcaagcaactgccacactgccttcttgcaggacagacatggcacacatggcttgtggcaatgctgggaccttttgcctggctttgtaaatcctgtctgtgtctccctgtgttgagcactgtgagtgagctacactgtagggctgagtatccctgagtggcagcttgagtggacatgatcagtttacatgtcagacaggtcactgggttaggcaaggctcccccagcatgagactcttgtgggttctgtgagtcacagatgcagttcctggaggtctaatgtactgtttaaccagcaggcagggtgcagacttaaaacatgggctccggagacagtctctgggctctgaggacattctaggattatgtgtttatgcttacatggatagtttggtttggtttgtcttacaacttagagtcaaattctagtgttatccagtctgtcctttgtccctgtgagggaaagcaccatctggtgtgtgagatatgtcaccccttttgtgacttctttgaaggttcttctctgtctcatttggggaaatgagagctcaaaataaccaagtcatctttttaaagagtgggctgatgaccgagggagagctatttaccgtatgcttgttattctgcaaactgctaaaaacaaaacaaaacaaaaacaaacaaacaaaaaacacttggtatactcaaagtgaccctgtaggtgtagttgccttcttgtatatgtagggaaactgaggcagagggtgaggtaacacagccaacggcgtttagccacagccagcgctgtgggacagcttgctctgtatcctgtgcttttagcctctttactgtgcttcgtgtctaaggctttgagtacacaggttcttaagtgcaggctaaagacctggcgtagataactataagtctgtggcaaggtcacgcattgcaatatgcccttgggcctcttgggactggtgtggctcactcagagaggtcggctgctagccctggccttgctggagtgatggagagaataagctccctcacctggagcctgcagccatgtggcctgtggcatctgtggaagcctgggttcactttgcacagccgggtaccatactgcatttgggtgtctgtgcttatgggcaccgactgattttcttggaagaagagacgttgagggctatcagaaccacacagaagacatttaggggtcacacagaggacctggttttggttgtaggggccacaccctcttgctcttcctccttaggtgtctcctacacaatcagtgtggggaaagaatcttcgtgtcccttcggggactcagagtctcagaatcaggatcacatttgctgtcagaaaggacctggctgcccgggcttgattccttcacgagctgtatgaccttggccggttactccatctctctatgccctgatttctacagtaagccagaagccacaaggaattgccacaggacttgaaggagcaaacaatgtctggcagagaacaaatacgtgtgttaactctaattaacaatttgcccattactttcctgcaccatcatcattgtcttaattgttaccatggttaccagtttggtggcacttataggtcaggtccacatggtgactcaatttgactgaacttgtgttttgagtgaagaaagaggcagaaaaggttaggtgaccagccagaggatgcatagcccctaagtgacaacatctggtgtctatctggtccagtggtggtctgactttctgctgcctgcccttgctgctgtccaaggtaccacctccaggcacctagtctaagccatgttcaacaagtggttgcccaggctcttgtgctgttgaaacacacatttacgatgggaggtggcgcccaccagaagcttaaataaactggtttctcctggcgtagatttacagttgcagatgcctcccacggctcagggctttgactttttaatttaatcttccccagattcaccaagggccttcattctggcagtttcctgcctgtgtgccaggctccagggagctagaccaactcaaaccagtgcatttgtgttgtctggaaggggagcctatggcctctagcctcctgcctgccttcctacagaagggctctgatgaactggcccactcctcagtaccctggatggcagcctctccagccagctcctgagattgcctggcacatttggaaggccgtgttgatattctgggcaggcctgccaggcctctgccattatgtgtgggcaaagctgtaagtaggagcaggggagaggacggccctgtgtctctctgtggaaagttcctgagaggaagggacaactcctcccaaggatgactctagggtttccaggattgcaatggagccccccttccataatgtctaactgagaaaggactttgcagacctcggtcagggccggagcataaagcagagaaggcaggggtgaggatatagctctgtcagtgaaatgcttgctgtgtaagcatggggacctgaggttgatatccagaatccagatgggagaagtgaacaaaccaaactgaaattgtggtgtgtacttgtgactctagtacggagaccctgtctcaaaatgttagatggagagtgactggggaagatatccagtgtggtcatttctcctttagactatgcacttagacacacatgcatgcattctcaccccagcacacacacacacataaacacacacacacacacacacacacacacacacacacacacacacacacacaccatggcttccttgtggcaggaggagctttggatggagattatctgtagaatctggtggatttggagcatgagggagggagaggaggaaggagaagggaggaagcaactgtgagaactttaaggtagggactgggagccgtagagcacactgcctcctgtgcatccatcctcctgtctccaatactcagcagtggctcagctgcaggagactgcaagtctggtgtggctcacgatggccaataccgaattctgttccctacatggccaccaaggctagtgagtcagttaagcaccatgctctcgtggtctcagcagtgagaaagagaagcaatcatagtgatttacctctcagtgctggtgggagaaattgctaatggcaggcagcagggtaaaaacacacagtatcattggcctggaaactgcttgatcacaggccagggtacacatggcctgggaaactgggcccggttcttggtgtgaagtgggcccgtcctcccagaacacaagcacacatgtgagcagtatctccaaggtttccaaggggtctgtagggctcatatggctccatctccaaaacaaagggtttgagtggctctgggacgttacatgccttgagtcctctgatcgtagcctctgctgtgtcagaaggccagatatgtgtgctgtgttttccttgactgctatgtcgtgcatggagctcctgattactccccaacactagctcaagcattttcctttagacatctccctaataatgtattcttctatgccaagtgtgtgcttcttcctgccggcctcacagtgggtacccttgtctgtagtcagtcgccagacagtcatttattatggacttggtgtatgtaagatgtaagctagttgctgtaggtgcagctttgacccagatggataatctacttgcagtgcccgtgctaacaggcaaatctgacagtgctttcctaaacaggtgaatacactcaagggataattggtaaagtccgtgttggaaagaggcatgatagtgaggaggaccaaggaacagggacataatctctatgagggtatattgggagagtttccttgaggaagaggcatttaggctgcatcttgaagaatgagaagagatcttgcaaaaaagctccaaggatggcattctaagaagtaggaccagcaagcaaccgtcggtgtgcacaagtgggagggggggctcaggataaaaacccaggggaaagcttactgtgatgggcatggacagagccagggaatggtgcaatgacaccagtttcctggacctcacaggccatggtcaggagttttgttttcatttcctaagtgtgctgggaaacacagaagtgacatggattgactaagctcaccgaggatcactcaggatgctttttggaaaatggagagatgaaggggattggaagagtagttccaggattgacatactgtcctgcctggtgtgtgtgtgtgtgtgtgtgtgtgtgtgtgtgtttgtgcactagtgtgtacacttgtgagtgtgagtacacacctgtggggagtatgaggcttcctgttgagttctaggatatgattttctaacatttcttctccttctttttttttaatgtcgatggatctcatgaaaggagaacaaatttgcaagagacttgagagtagagggtagacactagccagggaatgtgaactttttactgaagatgtgcaagtgaaattaatttctgggtgtttagggccctcttgtcctgatagctgaagatgggcctgcatattttatgagatgggacaggtccaggaattcacagttcataggcaccaagtacaaacagatgggataccatctcccttcttgatatggtcccttacttgacatttgcttcatttgtctctatgtgtggtttgcatgtctgtgtgtatgtgtggaggtcctcagctgatgtctggaatcttccttataagatctctccacctcattcactcaggcagggtttctcacttgtgtcatatagctggtttggtttgcaagcttgtgctcgggaccccatcgctgccctttgtgcactggagttacacgaagctccagcgcctgtctggcatttacctgggtcctggggatacaaactggtccttatgctctcacaccagatactttacctactgatccatcttcctcactctcaatatctaatttttggatgaggcatacatactcattatgcttaagagattaaaatacaaggataagcctcccatttcaattctgttggccaacaacgaatactattagcacagatgcgtgaaactgttactttctccacgtatgttgtgctcataaagtgggcttcaaactttgtaaactggtccctacccacagcaccatcaacgagtaaggaatattcattgtatcagtcaggctgggtttggtaccagttttctggtatcagtgccagaaaatccccagctctgtatggctttagataccaaagggtctatttctcatcactgtcctgtgaattaccacaaactggtgccacaataaggggcctctgtgcttgacaacctatggggacaacacttactgtctgtcgtgttcctgttccttatagcagagggacggtcatgagatcactttcatcatactttattggccaaagggtgtcgcatggtaccattcaaacatgtttggaccagagcgtctgatctcatcatatgctggggcaactgagaggcaaaaaatgttgatgggcagagctaatgatacatcctattcttgttcctcctctatgcagtcagtattatgaattactacatgcaacatagaaaatgcatgtctcagtaggacactgcatactcctttgattgcctgaggcttggtgctgctgtctctgggactctcctgtgtctcagctgtccccagtgatgatctgatagagactgacccctcagattgattttgcctcttgccccctccccagagctcttgtgacccataagggtaaatgtcactccgcatgtcctcatcttgctctgcttcttgggaaacctgagcaaggtgactgagatgtctcaacagtgaggactgtgacagaagtgtctgtgaccagccagatgtgtgtgctccttcctgtctctcggctgccaggggcaaggcatgggttttgagtgaggctagagtctcacctttcatgtagctttgggacttggtttccttgttgtctcaagaaccagatccctcctttgtgagatccagtgtctgccagctgattggcccctggtacccttctgaagtgtcctgataccctgagcccagtcttccgacattttcccaggctccgtctttctgattttctaacatcctgtaacttttctttccttatgctcttttcattttgttttagtatattcccaacaaacgatcagccttaaaaggataggtttttgaacaccttcaggtctttcctttggagatagggtctccttatgtagccacagtcagccttgaatgtgtagttttcctgctttagccccagtgagctgggattacaggcgtgtgtgtcaccatgccccacacgcacacctttagttcttgaggttgtaaaaccatatccatccttgtacttgtgggtgttttgtgtgtgcatagaactccagatatctagagtcaaaacagtttttccttgacatttcaaaatatgtctgcttgtcttctggtagtcagccttgctaattagctcaacacttaaaaagtgtctgctcctttatagtttcattttgtctacacaccgtgactctgactatgcacttgtagtaaatattcctgggagactttagagtgccctccaccactgtgtgtgtgtgtgtgtgtgtgtgtgtgtgtgtatgtacatgtgtgtatgtatgtatatgtgcatgtatgcaacatgcattcttgctggtgttcatgtgtgtcatatgaaggccagaggaagggtataaggtgcattcctctatcctattcctccatattctttcaggacagggtctttcactgaacctgagtcttgctatttctgcaggccggctgaccagtgttcccttagaatccataggtctctaccactcagcagtagtgttacaggtgtgtgcagctctgcctgcattttgtgtgcacactggcgattccaatccaggttctcaggcttatactcttcctcaccaagccggtgccccaatgccaggatgtttctttatggcacttttcacttacccactgtggtgtttcatctagttcatttgatcttctttcttcagttctatgaagcgtacggtccatgttttcataattacccgttatttgatctgttacccatcggctctcagttggcaggtgtttgacttcacgggctggttctccgtatgactcttttcctctaccttttattcacagaatttttttggctttattctgagagcttttcttaatgttttcttctggcttttatatagatttcttttttcccttttgtcttaatttccataaacgtatttcttttcgttcttcgcttaaaaaaaaaccacccagatttctcaacatatattttagagttattaaaaaaaagaaaaacctcaaaaatttctttcttttatggagtcctctggtttgtgcacatgcttctctgtgtgcagggcaacctttggtacttggttcttctcttccacctttacatgggatctagcaatcaaattcagatactgggcattcatgactgttgtgcaggtctgtattttagtgttttgacggttttctggattatttgtgaagtgacaaatattaataattttatttgcttagaaaacaaggatgaatgtctgccatcgttgtaggcgaggtcactgatatactttcctagcctttcatgtctcgcagttccgtgtcatgagcatccaagggaagctgcttcgctcatgggcgttttgcatcgcatgattgtattgttatgccttttatttctattataattttgtggtgccttttgccaaacaccccaagcatcacagatgtaataaattgtagtaataaatgtgtccacagggcactaaaatttccagcaacctatccttgttccgtatgcattgttcttttcgatgtcctcggagacggtaaggaggagtgtctgaaaagcctgtgtgcttctgcattctccctcctgctagagtcacttctatgggcttacttcttctagcattgggttttctcccacaggggttggatgagttcacttaattcatcttaggaaagtagggtgtgtgtgggggaggggggggtggagatgtgcagacagttgattggttttgtgtgtcatgggtaggtcagttgattggcaggttacacttggccattgtgggactggtgttggaagttgtactgtgttaagctgcagagggacatttgtggggggaggggtgatcttccgcactcttaagcctaggaagcatcttgagagattatccagtgtcctttgcagctcgcatgtctcatttcagcccaggaagtggcttttctggccttggagaagtagccctgggaggccagcacttagtcctggtgacctctgtaaaagatggtctgagtggcccccctcctcctcctgccgccacggtagaagcttctctcttctccttccagccctgtcatcccttctctgtgtgctctgggtctatgatccgtgcttcctccacctgctgtctgtgttttacaagctcccagtggtattatgacactgtcttattgtatttacttactgtaatatcagtgggcttggggaggggcagggaggtgaccacatgtcttcagcgggacctcataagtcattcattggaatcatgatttaaaacctctgatttatgttggcgatgcctggtcgcctgatgcttacacctttcttcatttcctcctccctttctccatccctccctccctccctccttccttcccttcctccatccctccctccttccttccctctctccctctcttccttcattccttccttctcttctcattttaatcccttgatcattactttgggtttcatcgccagaagtagaataaagttagatgtaatgataaggagaacaatccgcatctgcaccccagcattggctggctgggggttttgagccgagggcttcgaatccctgagcaattcattgttagctggggatgataatattctttcatcagagggttgggtgcatggattaaaatcaataaagtgaatacacacgcccatgacatttgacattaaatatgctttctgttcataacggctgatattattgttattattcattatgtaagcctcatggcagggaggggttattactgctgttgtatgcacaagaaagacaggtttagaagatttgttgttttctcattgctttttttcccactccccagccactagcaacaagctgagagatggggtcattctagaatcagaagaggtgggtgttttttttgtttttgttttttgtttttgccaagtgcagtggtggtctggatataatctaagacttccagataaactagagcctcagatggtaccatcccctcatacacacaggtgcatgtatgtgtacatgtgtgtatgtgtatgtatacatgtgtatgtgtgtgtatatattacatacctgaagtttaagtcatttggatgccaccatcattaataccaatattgaagctggataatcccaatactgtggtagaataaatgcatctttgaagtatgatttgtttaatatagtcttctgaccgtgagcaacagatactttagaaagcagaactgtgggcattggacttttgtgaggtgggttccagactttattattcagagctgacaaatttgaaaaggaagatgttttatgtatccttctgccctactgacatcagtctctatgtgaagaacaggggaaatgggcctatggatatgcctgtggggtgggttaggcagagtgagtgcctggtttgaacaccctgctcatcagactctattggagtaacccttctgggagtatgtcattaagttaaagagccaaagtaggaatttaacccaacactgtctgctctcagattgtatttctgacttgtgtagaagctgatactcctaacatgttatagaatagccacacagaggagctgagcaaatattcagagagttggcggtgccagagtgaaggtctatgatactggattggaacagtttggatggggggctctctagggtgtgtggtgtggtgagctctcgactgccttgatgcgatgcagaccaagacattgtgtctcatgaagcaaaagcatcccaggcaacactgaacaagaatctgagcagtgctgtgtcctggccgattggatttccaatgcccttctagagcatggcatagacctctaattgctggatcaagaaaagagatgccgtggtcagagcacttttgaaagtctccatccttggaaacccatcgagagccaaattgtaccacagggcacaaaatctttgatgtgtgttttttgagaactttgcccattgaaatattattgaaaagtggcattttccaaattgaccattgaacgtgatgcagctcaggtgagttaagctttgttttgtgtccctactaagacccttctctgtgctggggccagagtcccctgagccatgtactcatgagttagagcttcattcattgcaaagattgatcatctctctaaagatagagatttgtcctgtctttaatagaggaagatatcaggtggctcaaaggacccaacaaaggaacttcacaagtggtgaacgatgacagagtctgatatgagccgaccaggacgcaccaggatgtccaagctctgcattggttaagagagaaaactaatgaagcaatgtggatgactttaaaagaataagaaagtgaaagaagccaactccaaagcatcattatctctgattccatgacgtcatgcaggaagcaaaagtcacagggatggaaattgccagggatgagagggaagaagtggagtccactaatgagagagcattggggaatttgggagagtgctagaaatattctatatctggatagtaatggctatcagttgactacatacctcagtcaagatgcctagaactgcacgcctgtgcagagtggatttgtctgtattcattaaacctgaaatatagcaaatataaaaccagtgacattcatgaatggcgtatctactgtgcccactgctggtggcatttacctcagtttcctactgggagagccattctttctgctaagaacagtaggattagtgagctctaagcttgtggggggtttattgaattattttgtatagatgtgacaactcagagtcatagtccttattcactaatttaaagtgtttccaggcatttctgaatcctcaaaggaagattatgttcagaacggtttaaggttgaatgtgctttattaattttggggtcttttggaaattagtaattcacgcttggtggcatgaataactcgttattactgcaaattattcatcaggccataaaacagagtctcctctagtcaaagattttactttggctccttatgtttaagacatttttgaaataattcagcaaggtacagtctttagcacgaaatagtggctttgatgtacagctaagcacctcttttgtaaaatggaaggggtctagggagggatatgggtttacaactgcaacagattttacagtgcaggatacaggtaatctgggttggggtatgctagcttcttgttttagatgagttgttgggtttggaaacatggctggttgtatttgcatttgaccttgtgtttgcccgaggtatccgttacaactcagtgtctgtcctttatgagaaagatatctaatggtgaccttgaaagactagcagagagggaagtgtttgaagggagcctggggcagtcagagaaggctcttcccttggtctggtctctctgatttttctcagggcctttggataaatcctgacatgaaggtgcttcatccaactgaacaccccaaattccagagcagcctttcctcctagagacctctttcccctctcacatagacaacagaaaacccttccccaaactactacaccctctattgagtatctgtcagctaaggttcccagttgcttgtgccttgtttagtcttagattataaattcaggaggcacaccaaggtactgatgctcagtttcacgttcatgaatatgcctcagtgagagatttccagtatatgtgctgagtagtggttctaacacaaatggggaggaagcctttcccattgccagccaaatggtactaactgaatcctgtatattgttgtgagagccagatgcagggtagagaaaacctggaccagcataggaggcttgtgaagggaggaggttcttgaaccaccttggtggatggtggcaacggctatgcttccagcccccctacctacattgaaagagctctgggagctgtgtacgtcttccctggagcctaattaataacatcagctaccctgtgattccaactggaggctgaagggaaactttacataattgtcactacggggaaatattaaggtggataaaataagctttgtattagctgcaaaataccttatgttatcttgttaagttattaaagttaatttacttctattataaaagtaaacaccagttgcttttctaagaggaaggtacaggaaaggagaaagaaaagattcacataatcctgttacctaggagcagccatatttaccactttgatttccttccaaattttttgctgttttccctccttaagaccacagaatatgtgcatatattccatatacttatctatttctctggtttttaattatagaaataatagctgcattcattaggattaatataatactgagagtgaatgacgtcacatgcattggcagagttgtaaagacactgggaccgtatgcacgcatgcctggtgagtgtgtgccatttatacccactttaaaagaatagtctggcagtttcttggagaagttaaatatcagcgtgccagaggactaggttgtggtacactcggggagctttctgttccaaagcagcacctgcgtccattgcgagtcttgggctttcgtctgctaagaaatggataagccagggtgatatataccgaccacctggcccagtgctgctctgtgcaacagtctggcaagcctcgggactcaccacaagctaagaatttcctgcatatgaaactttcagaaatgtccaaaccgacacaggaagtaaatggtctccgtgctggagtggggaatggaagctgactgcggattgagtatacttcattttaggatgaaggaagtataaagaaattatactgtggtgatggtgtcagctggacaatctcttagcctaataaccactgacttgctcacttagatgatatatcggttataatttgataaagttaccaaaataagtggtcatataagtactagtctttattttctgtttttattatatttcttaaaagtagtaagaggtagtttattctggtggtattttgacttaggttacccaaaattctatgttccagcatggaagcagtttcatgaagttttatagctttacagaacaaagaaagtcacaaaataagggcaagtttaaagttcaccagagaggcagctccagaacaaggtggggacattggggacatcttttctaaggcccaagatgatatctgatggcagtctctgcttttgggttgttggaagctagtggtctgctaagttaatagattcccaaattttaaaaacctattagtcataggatgttagttttgatacagaggtaggcaaggaatggctgttctggagggctagaattggctcaagataggctgattgccctctggacttgcaacatccctatctcttcacagtacagttctagtcagtcagtcagtctctgaagattcaacttattttcagtttataaagagtaatacttatttacatatagacagtttcatacatgtctacgatgcatcttgttcatgtccaccactaactgttcccatgcatctccacaatatgtcccctgcccctcgtcgtgacctctccatttttatatcataaccaatggagtccagtaagttcttcctgctggaatttgactgatcttattggcttgctctcatgcaggtaatcacagagctagtgagttcaagagcgcagtagctgtgttgtgtcgtgtccagaaagcagcatttcccagcatgctgtgattccctgtcccacttctctgattcacaggctttcatgccttcttccaaggcattaccagggccatgggggtgctgatactgatgtcccatgtaggcctgagcatccagccatcacttattcttagtactttgggcagttgtaggtctctgcatttactattttccaagatagaaagaaacttgtatggccagagttgatggcactgctgatgcatgtgaataaacataaaaggcactttgtctattttgcaaaataacagtggtggggtctctcctctccagggctatgtgagtcaggggctttggccagggttacagtagcaggcacgaactcactcctatggagaaacagtattctgaatccaaaataaacactaccaaacaacaacaataacagcaaacctgataatgcataataagggaaactcttgttcttatcatggtgttaaacaagggatgatgtgctggcaacttctgttcagggtcctggagatgtcagggtgggacttaatttctagccagtgagaatgtgtaagctcaagtctatgcacagaatcacagcccaggaaaagtatctgtgtattgtgtcttagtattggggttccataactatgaacagtcttttaccattaagtgagaaaacaagttttagttttgtgccaaagttaggggtaaccacgacaatggtaattcataacttaaaatatttccaaaatgcaacatgaaaaaaataaaattttttctctactcagtaagagaaggaaaacaaaaagaaaattgcataataagtagggaacataaaataagacaaatcaaatctatgagatcagtgattacaggatgagagggttaatctcactgattaagacacaggttcttttagactggcttaccaaaagatccagccaatcttctcattgattttctgagaggcacatacatgcaggagtagagcaaggctgaaaataaagggctaaaagtggcattctaggaaaataactacaataatacaagtctagcaatttcaatatcagacggaggtcaagttgaggcaaagaaagaaagcagtgctttattctggaaatgctccaattgcgtggtgttccgagaagatataatagtcatgagaaaatacaaccaatacagtgcaaactacatagagacacaattgcaagaattacagtaataaatagacaatctatcattttaggtagagatttcaatatatcccccttggaaacctatcacgcagacaaagaagaacaaaaagtcttggataaactggcaagatgttgctgggtaagaacccttgcctccacatctaatgacttcagtttgatctcagggactcacatggtagaaggagatagccaactctctctgacctctacatgttcactatgccatgcaccccacccctcatagaaaataaataaattgatattaaagaagcattcagtaatgtggtcaacagttttatacacagctagttaaatggaaaaaattaaaaagaagaatgtgagtctagaaagtctctgatttctaaaaattgatcccattcagactatagtcttgaactcaaatgaaaggagaactattagtcaggcatagtgaggatcttctggaattctagcccttaagaggcagaggaaggagaatcaggagttcaaggtcattgtgctggtttgtcagcttaacacaagctagaaagagaaacctcaactgagaaaatgttttcatcagattggcccatgggcaagtctattggagctgttcttgactaatggttgatgtggaagagcccagcccagagtgggcagatcttctgggaggtataagaaagcaggctgaagaaggcaagaggagcaagccagtaggtaacattccactatggcctctgctccagttcctgcctccagttccagctttgagttccagtcctggcttcctttcatgtaatccataagatgaaataaatcattttctttccaagaaaacagatttcagaagcattctcttattagtttgttaagaagtaagaacagtcatggtttctcacactatatagagagatgcttttggattaagtaataaaattagtatatagaagttttatggatctaaaggaaagggctaactgtctcatttgtacatggtataatttaagggaaagaattatcaggacaatttttagtaccactaagttcaacaaatatgtcagagtagaatatggaaatcagtagtttacctctgtgtcataataataagttgagaaaatgcattaaatgttattcacagtatcaaacattatgatgtctatagggtttaatttaacccaaaattacatggtatttacctaaagaaatgctgaataccatgaaggaaggcctataggagtggagagttataccatgtttatggatagaaaaaaagtcaataatgtaatgatatcattcatccaaaaattaatgtacaattttaatacaggtacatttacatcagaagaatttatgatgatattggtcaagaagattctaataattatatgcaagaaatatatccactaacaattacttgagtaaagaaatagtacagataaaaactgaagatttaccctatcactcccatcacgggtgccaataagaattggcaggaggcaggctccagattagtgacaaaggaggacagtggtgtgtgtatgtgtgtgtttctgtgtgtttgtgtgtgcatgtgtgtgtatgtgtaaatgtgtgtatgtgtgtgtgtatctgtgtatgcatgtgtatgtgtttgtgtatgtatgtgtgtacctgtgtgtgagagagagagagagagagagagagaaagagagagagagacagacacagagacagagacagacacagagataaaatagacctagaaagcctgagagagatagagaggaaaggacaagcagagaggggaaggggaaggagagagacaagagatagagatagaaggtagaggttataggaggaggacagaagggggaggagtggagagagacagagaaagcacagatggttggctgtgcttaggaaaggactctaagggcagtctgttcaaatgtacaaaattgacaccttgtgagaaatgggcccggaacagaactgcagagcgctctgccatggtggaagtccgatgtgggggaagtgtggtggcacgtgtatttatgtgtctggtgctagcagcaggatggcgagagagcagccagccacaagagcagcctcccttacatcccttgcaactggggtttatctcctggcggttggctctgccttttccctgccactcacactttattgggaaatggattctcttgccaggagagtatgattaatactgcaactggctatgggcttaacaacagattgatggttatatttttaaaggggctgcctgctcatggtttatactgccgtggtctgcagcgtttatcatccctaagtgggaaaggtttgtttgagttagatttttgtgccattccacatggcgtttgttgtttgccagccctgcctgccaccttgcatttgttatttgatttaagacagtgagtgtatgtgaaaacaggaacccctgttccaaatttgtatgtttcgcaatgcctgcaggcaatacagaaaacactgttgcatgcagttatctgactactgtagacaagaaagaagcagcagcccgtcctggcatccaggcctggtctgagctggtcagcaacatctaggcccgattcctcatctttatagaccccgagactcatttacttcagatttcagagagggttagtgtcaaggagactggccatgttccctggccacgttcctaagacagtgttgcccaaaccagatgctaggcttcttaattcctagcaacaaatagaataagtgggaagatgaaaattatggtttactccctcagttgttcagcgaagatattgaccttttactgtgtgctagacactacacagtgcagtaagcacagtctctgctattgtgaagcttacagacaagttagaaacagacattaaataaccacacacacacacacacacacacacacacacacacacacacacacacatggaaaattacagtggtctggagagcctggaagaagaacatgctaggagcaggcagtgggagagggagttcctgaagagttgatgccttatctgaggtaagaaggtagagtgggcattccctacgtcaaatggtgggggctatgatggggaggtgggtatagacccactgcttggcatgctactacctttataggttgcttagttacagacccaagaggaaatgagaattgtcagtggttagtgtgaactcaacagaaaggttgctggatatctttatcatccctctactctacgtaagtccaaggatgatgggcacagcagctggaccagtgtgttttacattccatgtaggggattggtctgggcaactctgacactggacttccagtttcttcctgtgctctggactctcttaagctgaggtcatagtttcagtaaagggcttttagtttttgtggtggtagctatggctgaggctggtgttgtaaacagtgcctagtaggcattttcattcatacctccatactttaggtcacctcaacgatgtatgcttgcatgtgtgtgcgtgtgtttttgatttggctatttctgcctgagttcacatttgcatgtcatctcttgagctatgcagcctatctgcagttgacaaaagacctacctcactgctgttgcaatggctggagacacatgtgcacatgaaaccttaggtgtggccttagccaaagtgtatttctgttgtgatgaatactaggtttgccttggtcttgtacttcaccaccagagtgtgtgtattcaacaagtcttgctgaatttcactatgaattgagtggagttatagtctaaagagagtcaaaggccagagcagtccagccattacagccatgccttgctacctgaacctcatcctttgtgtagatccagcctgtgctttccatgttggggtggacacaaaactacctgttgttcaaaactctgctctgggtgatcagtctcattgggaggctgcctggaagtttagctgaggtatgaaaaggacttgggcgaagaccaaagttcagggaggagaagaggcatgaaatgaggcttgtgtggaggctgggtgctttctcatttgtaggaagtataggacttaaatggttcagcagtcttgatttttgggggaccagttgaatggtgtggtaccaggatgcagtaaaggtaggaaggaaatggatagtggtagctgatgctgtaaatgtctatctctttgtctctgactttaggtacctctggaattctgttcttcagaatgtgcccttttcagtcttttttgagactttttttttttcctttgaagaattggtaatactcataagaatttttttcttgtgcaatcaaggaccacatactcctaataggaggttagcttcagattacaaaaaaaatgaaaagcacattcattagtgttaacctttttaaagggactttggcttgcctttaaaatgaagataaagagatcaaattctatcaaacatataaatatgccactaatcaatgctatcagatatgaccattttatttttgtctcacagaatctgaatcatagaatttaatgctagactctaggaaccttaacacttaactctcaggaccattaagaagtaggaaggcaaaaaagagaatggtatgcatagaactaaaaggtagtgtgggttgacccagtagtgggaggcttcggttatatgtggccattgttagcttgtcactgaaactggaaaaaaaatactaccatctcctgatgataggccaagaaataagttttcaacaggaggtagaagatctatgatagagaagggaggagagggctcactgggcgaggtacttcctgtgcaagtatgaggacctgggatccctagaatccatgtaaaaactgaactccacagtgcttgtctgtagagggcagttctcaggtaggggagggagagtccccagaagtatgtgtgccagctaacctgacctactaaacctgtctcaaacaagttggaaggagaagaccaagaactgagttgtcctctgacttccacatgtgtgccatggcatgtatatcccacatgaacacacacgaacacacacacacacgaacacaacgagcatacatgaacacacatgagcacacatggacacacatgagcacacatgaacacatgtacatgcatatatacatgcatacatacacacatacacacaaagatgagaaagatctatgatatgcatagaaattttgaataagttaggttttattaaacctctggttagaggctctttaactctgtaaaatagtttctggaattctggacaatggaaaagaggtttcaacctcttccttgagacctggtaactggcatttcttattttaaaagggaacacaaagaccctattgacattttacgtaaaggcttgcagaatcctgattgtgtgacacccgttcagttggcaatttggtttccacatatttatttttctgcaatgtgttctccatttcagatcttggttattagttcttctcttggtccacacagatttagcctatgatgtgactgttggtttaatcaaaagaatggcccaagtagggggtatttgttctctgctcacgtctaattgaaggacttcacgttaactaagaatgatgcccagttgggcaacgcatttcacttgggaggttgctagagtgtctcgtgcaggaaccacagctccattctggagatgcagcagcctgtggggtagaagccgatgaaagcttatcagagcatagcctgcttgcataatgaatcgcagtaggaactgtgacctgccatgctgctttggcagtctatgttgcctgcagccttctgcagagctccagatttctgggtctgggtctctgctggagagaaactctttagatagatgaaataatagaaaagaccataggcacttgaaactatgcaatcccatagtaccttcttttttttaaaaaaatgtgtgtgtttttcagcttagggacttttgtactttggtgaggaatcccaagagaaagctagtttttacaactttcttttaattaggcagtggtcttaggctgctgatacatcttcactgtttggtgctaaaaaaaacacaggacaatggccgggaggaaaacaaaacactgctcattaagggctgggtgtttattttctggatccatgcatggatctccccagaggccccatgctggtgatgaggccatggaaaagctctggggagggggcagagtggggtgtgggctttcaaagttggaggcagaacatcagctcactctctctggaagctttggttgtgtagagaggatcttgtgagtgagggcactttcctcctaagtgtggggatttcatgatggagaaagctgctcttctgttttctagtggctctgccaacctgatacttgatttaagaatcgcacttagccacttgctgatatagaatctgggcactgaaagccgcagttagaaacagctcagttggtagaggacagtgtacagaaagccatgggtttgagcctcagcaccacatacactgagaacagtggctcatgcctgtaatctcatcacttccgaggtgaagttcagggtcatccttaaccgcactggcttcaagtctatcctgaatatatgacatataccatgtcaaagtgtcaaataatgaatgaataatttaaaaaaaatcttgttcagcgttcttactttggattctagaaagttctgaaaaagacttctgtcgtgtcctctgggaatggagagagtggactgacagaatgggaccagggttctgcgactgaatagctgcatcacactgagcaagtcacagcttctgtggatacgtgtggggaccaaagcccggggagttctgccaagagttgcatggataataagtattcacataacgctgccttcctgcagagtatagtcagaaacccaactcaggctgccaaatagtagactggcttcagtttcctctgttgaagatttatcttgttagagagccaaactttaagaaaaccacttcttttgtaccaggaacgaacatacggtcattagcaaaggttacacaattttgttttgttgagcttttatttagcaatgcgacaagaagtaataaatgtcctggcaggttttattaaaaggcttgcttaagtcaattatagctctatctattatggagttgctcaacatttccctcttatcgacattcttgaagaacactttaattactactcctttgtaaaatgacgaagccacagaaacactgtttgtatgttagcactggccacatttatatgttcatacaatggcaccgtatacatttgtatgtttctacgctggtactggatgcattgagaacaataagctatcctccagtttttcaatgcagaaggatctagaaggcaccctcacctggacagcataataagaaacagacacatggtagcagttttgaaaatatgggaacatgttacactaaggtgaaataaacgtatatcaaacatgacttagcttacttacatcatgttttcaatactgaaaaacactgaaaataaaagccatcgtctctcagtacctgctttcattttcctctttattttattttgtgtctcatccctggtgtctacagtgtaatttgacaactattaattcagaaagttatttgttttggtcctttctgcggacctgaagcaggcattagttggtagccctggaagccattttgaacacgtaggtggttccagaaatcccttttgacttcttcagatctgctgcttctgcttgctcccatggtgagggacctcaccgtcaccggggcctttttttttttttttttcctatgcttggtggaaacttaaaaggatgtgggcttaagaaattacaaattccagaatgaagtactaatgaagttcccggacacaaatcacttcacacactccacttagaggatttgtttaattgactgaggaaatagtttgaaggggaagggagcatttcttttcattagtgttcaaatgaagtgcaaattatagaactcgggctccatatttcctaaagatagaaactctggagaaggggagaaaaattaggaccggaactcagtttaaaatcagaaacaaatgcagtttgggtagaaaagtttgggcaattttctacatggataatttgagagcaactaactaatgggggctggaaatgactcccccctcaagtgcctggggtttgcagcccagttttattttgtgtttgtttttatgtcacattcagcctgattctttaattaaaaaacaacaacaacatagtatctgggcagagaagacaaggcaagtatttgaaccaagtgtcagacctgaggtgttaagtgactaaagatggtgcctgcaattataggggctggcataaaattacaggccttattaatctgcaagcttcctggcttagctcggctatcaggtggaccagtaaccggtttctgctgcacatctcctcgcccaattaaagccagtgcatagccatcacatagaccatgccattatcataatatgttgtaaggattgtttcttagactcttcatggggtgaatttcacctctgaggctatctgacagacagggttggctctctttagcccaattcaagcctcagcgattgccagctctgtacacagagatgagcatggccattgtcagtcccagggacctcatcatcttaacaactgcgctgtgtgcctggactggtccacataggctaggtcgggatgccagaaatagttataaagcgaatgctatggccaggtgtgtggaatggtcctcaccggtgctccaggctcgtgggagtgagaggcaggtggatctctgtgagttcaaattcaatatgggttacaaagaaagtttcaggctagccagggctacaaagtgaggagagtctatctcaaagacatgacataacaaaaaaccaaccaaacaaaattagcaagagaggcccacccaccaccacaccgctacattgtgcaagtgtgtgagggagagatgagagagaaagaaaagcacaacagtttgagcattaagaagaaaggtggagctggtgacgtaaggttggagatgaagagcctgatgtgagtcgcctgccctgcctgccctgccacttgaagccatggtgatatccaagcccatgttgcccccaagggccaggcctgggtctgtagccatgcagtagcaagggaatgtaatattcggatattggcggcacatatcaccactaaaaactatggggtatgtccctggtttgggctgcctcctggaaccatgttgttgatgttcaaggattgtgcagagctggccctacctcatgctcgctgtggacctctggaaagctggcccctgggcagctcagaagagctggctctggtggcttgggtgtgggcaagctggctctgagggcatgagagggcaagagctgaccccaccccttgccagctggtgtgagtgtgggaggaatggcggaatgttgggagatgatcaactcagccaccatccagggctttgagtgggcccaccccaacatctaccgtatctactgtggagcacacgaaagggcaggtcctgcagatccaaagttgaaggatctccatgacacaggtcaacagcaagatatccaagaggagtcccgtgaggatccaggattgttagcatagcagaaaccagaggccctgagccaggccagtaactcattgccatgatcgtctacaaataaaggtgtgtggacagaaggctgtatggtggggcatgtgacacactacagcttacatgatgagatgtttttatgttttgtttatttttttatttttgtttttatcttcttttgagggggagggtacaaaggtagagtgcagatacaaagagatgggggggttgggatcagggtgaatgatgtaaaacacaaagaatcaataaaaagtaaaaaaaatgctaaaacaatagcaaaataaaataacaaagcaaatgtaatagagataatggggaccatttatatgggtttcaagaggaactgtgggagaagcacagagtcctttgaagggcattatggttgttcttcctattatgagacagactcaagctggcattgggcttaacatccttcctgctggattaaacctgtgcagtagcacacatgactaagatcaggttgtgtgtgtgtgtgtatgtgtgtgtgtgtgtgtgtgtgtgtgtgtgtgtgtgtgtgtgtgtgtggtttctcttcttgggtccaattctgtgggaacagaacttgaggtggaggtccagatggaaagacttccactaaattgcattgtgcattttttgttctttttttcttccaaattccatcaggcaggagagttgtttagagggctggcttgagcacatattactgcacacccctcagaatttgtggtccagcaagcctggacttgcacttgagatttacacacctccaaaactcccaagtgaaatggatgcctttggtatgaggatcacccctgatccgccacgctctcatatggatctccagcctgcagctgtgggcagctggggagagctgtgaatacggcttagagcaaaactataaaacttcttacgacattgagattggggggtggggtgggaaagatgttctatagttcgatagcatgtttttgaatgtgaactttatagaaaatgatgtcatgttacagtgtggaacgttggacttacctgcaaggagaaagatggagaaagatgcagggtggggcagggtggggcagggcagtgcgggggtggggtggagtagactgtaggtaaaggctcatctttggctgtgtcctgctacagtctgagcccatggcaggcctgtaccatgaaccacactgggttcaactttggtcctatcttcctctcccaccatcttggctagtggtgtgtggaagagatgttttggaggagggggcaggaatgaactcttagtggtcgggagcggccacttactagtcaagatattttaggcaatcaagaagcattgctgtgcctcttagggttggaggcatagtttgacataacaacacacgttctatgactaagagctgactgtggacacacgtctttagtgtgatttgcctgtttgtctttggggggtcacaggctcttctatgagagcatattctggggctggtggattgcaagttagcatgaagagcttgccttgtaggagactgcaatgagcctggttctccaaaacacttttccctcctggcaaaaataggatacttttccgattgatattgtataaatcacaagagggctgcccaaagcctcctaaactggagtaaccattatgcaagctgtcatacatgactaacccattattatggcccccgagaagctaagggactcccacctcatttctgggggagcccatttcacacctgaataactcttattttaaaaagtcagcctgatactcattacaaacttgcctttgctaaaagacattctgccgtctctcgtgaagcgctgccctcctccccggcagagctcttttcctgtcataccagaaataattctccctcctccatgctgcttacctctttagttaatattataaaggatagatcaagggtgaataaatataatgtggttatattatttattacagccccctttgaattcccacttaaggtaataatgacaggtaaaattcattctgtttccaaggaatcaatttgctattatcctccaaatgtcatcgttctcaaattaatgtgggggacttgttgctacaaataggcatggttattgctctgtccagtaggtagccaaggatgccagaaggttctgggtaatatggtgtcatgccttggcaatgaaatgcactgactgggttgatggtcactggaggcctggtatacatggatgtgccagggtcagaaatgtccatcaggcatattcaagggggggcagtgaggcatcaggggctatggtttggtctaagcctgtggagggggtcacctgttctgactttctatacctggggcttagtgtcaggggaaaggagggctcacacctttggagtcttatttctgtgtgtgctgattggcatcatggatgtggcttcataaagtatggactcacttatccagaagcctcagatcttacagaacaaaaggaggaaacccaggcagcagaggtcaagctcccctgccatcctgcacacccagggactttcgtccctctccctcctcctctttctgccacttttcaccaacctccactgatttttctactatgtcttcctctctcctcccccctcccctcttccctttcttcttctttctcatctattcccttttctcctctcctacctcctcctctccctctgtacctttgtagcttttattgctacgaactgcttcctagttccacccttactgtatctcttcttcctcttcctcctcctctttctccttttccttttcctcttcatcctccccctcttcatccttctcctgctcctgctcctcttcttcctcctcttcttcctcttccttctcttcctcctcttcttcctccccttcctcctcctgcttctctcctctatttttttcccttccttctctaccccctttgtgtttttatagatttggtcttcctcctcctcttcatgttctcttccttctcctcccactcctgatgctgcttctcctcactttcctcttttgtgtcttttcagctttttctgtcacccacaccctttctatggctcttctctcttggcttctcctgccccggtcctacacctttgatattatttctatatcttctttatatctgtgccctgtaatgacagggattctctaatattatccccagctcttcctctcctactgtgacagcaccatctccctcaggacagcagccatgcctctgtctctgcatttctgtgtgacagcgactactgctaatatttccctgagttgtcccacaggcacagaaactcagcacatcccagactggccccacttctctcccagatttctaatttcttttggtaccaagagccatagaggactgccccattgatagtgctactcagcttgcctgcaagctacctagtctcagcatgccatttttccttcttaaatgtgcagagatgactgcagttttttttttttaaggaaaagctttattttttgagttataaaattgtattgcagtgacactcacataagataaaataaccattttgaacaagcgatgtagtggcatcttgtacattcccagtgtgtgtagctgccatctctgtccccttctcaaaagcctttgcatcacaccacaagggaaccacatgcttggtgcttgttaagcagtcactccttactcccttcacccaggctggttcaacctattgaggagatttcacataaataggataatacacctgtggccctttgtgtctggcttctttcacttagcataaggtttcaaggtccatttgtggcacagaatggatcactgctgcatttatttttatggctgaatagtattccattgcattgcatgcatacatcacaatttgtctgttcatccattgatggacacttgggctgttttcacgttttggctactgtgactagttctgctgtgattgtatgtgtacgtacatttgttcaaagggagtctgcctctttattgccatggaatggaacccagcaaacattcttatatagggtcaaagagtaaatatatcaggctctgagggtcattgaataactgccagaattactgagcagagctgtatcaccgtagcccagagaagccattggaaatgagtgagcaactggcatgtcttttgcaatgttccaacaaagcagcagaaagaggtaataggtctgagctagttcgccagccttgctgatagcccatgaagaaaaggtgccaccatgacacacctggatctccaagtctctgcctgatcccacacttccctaacctttgtcactctgcatctgtcacacaactcaaatggaatggagtggagctggctttcggtgtgagatagaaaggggtcaacatggggaggggagatgcaagtgacgatgggccacagaaggacgcctacccagaagtgaccctggggagacaactctggcctcagctgcaaaggccaggaagcagataagggaattacagtgcttcccttcaggtgtacgtgggcgtccagggttcctcagggtgagagccaacttagggacatccctagcagtggtggagagttcatacgcttctgcagttcttgggctcatctcactctaagggacataaagtgacaagttcattgtctgcagcatactttttcaaagagttgtaactcacagagcgcaagaggagacagaaaggcctctggggacaaataaaaagagtttatggatgcaaacggagtgagtcctttttgcatgagcagggagccatctgggtgacagagacagtgatggggccttgaatgtctttgtccttggatttcacacaggcacctgctgtacacgtacagcttttgtccgagggatgtccctctcagactgttaataacatttttttcaaggcccaaacttttatagatttaggagatgcacagaggagacacaagagtctgggtgtgacagtcagggagaagtgttccagccctggctctccctgcctgctagatgtgggacttacaaattcatttacctctctggacatctgtggttacccatctataaagtgaatgctcaccaaccatgagctcttgggatctgcatgaatccatcagaccacacaacctgcatcctggttgctagcctcttcctggtcaacctcctccatgcgtctctcctttcagatgtcttagttttgacttgtacagtccaccctccagagccacagatggcagacagtcatattcctgagtcggttgctcaggaaacatttctcctacctagactgctgggagattttattttcccaccaagagatctttggatctggtccttacaggccagctcactgctttacggtggacatctttattcttctatattatttgtgctcatcaaaatccacttcatgcttcttttaaatttttttatttattattatgtattattattagtgtgtgtatgtctctgtttaggcatctagatgcaggtgtgtgctcgccacataatacacatgaatgccaaggggcgacttttgggagttgtttttttcttcccaacaaactgtggtcatcagaacttgtgtggcttgtatggcaagaactttgaccactaaatcatttcctgcttccctttaagtcctcatgagagtattttccttgactctattgttgttaaacatcgagcatcctgagtcctagccagtgcaatgcgggtgaaagttaaatgaatacatcactattaggcttggatcataaattcattggcttggaccataaattctagcaatgtccttttcgtcttcttcattcgtctgtggaagactctgaagtcgcaggtttgggtggaactggagctgtgactatgtggtgagttattagagtcatttgaaggaaacatgaaaccatcagaacctggaaagtgctcgaagcctcactcatcctgacaagtaagtctgctgtgtgcttaggatagagatgctggagagaagggggagatcagccttccctttgctgcttccagcctgcagcatggctcttcaggagctcttcaggaggagagctggttttggttctggaccaaaggaccaccttccgctatggggacaagtctggaagtagctctgttttctcagtcgaaggctaggttttctcctggctattgaaacctgacacttcccactgggtttttctttgggagacctggcaaacccactactaagagccccctgattggcagtggaaggtgactgaagcattccctggggtggcctgggacatgtaggcctccccatgtagtttggcacaagtagctcctgtcagctctcagcttccagaagactcacttgaacttgatgtgtgttggggggaggggtagcggcacccatagagagttcagagcttgatgcagcagctctctggctggcttgtgataggatttgattaaatttttttttctttgagtaaatgagctagagtggattgtttttatttctttctctttattttgaactcatccagtggagctttttgggggatgatcccatagaggggtgcgttggtgaagtcattataatgcattgtgggtacacgtattggttaaagtaaaaccttgagtatcatttcttaaaagaatcatttatttattttatgtgtaggagtacactgtagctgtcttcagacacaccagaagagggcatcagatcccattatagatggttgtgatccaccatgtggttgctgggaattgaactcagggcctctggaagagcagtcagttctcttaagcactgagccatctctccagcccccaggtatcaatctttaggagttacctacatggtctctgaatggcttaagcttcaccagttaggtaaggctggcatcatggtgtgcctccaagacctgtctgtgcttgcctcctcagtgcggggaatgaaagcatgcaccattcattatgcctggattcttacgtgggtcctgaggatctaactcagctctccattctggccatccccatagccacaacaggttaactctgtaacaaatgactgcaagattttgttatcactatagtggagattggtttccttcatcatatccagtgtgggttggagctgtgctaaagcttttccatcttgtgattctgccattcttctcatccgtggaattcaaatggtgattagggaaaaagagggtggaagagagtcagaggtttccattagctgtgacattgtaccatcttcttacatatctgggattctgaggaacagcctaccgtgtgtccagtagatgagttagtagaaataggacaggatgagtgtgagtaggtagtagtccactattgaagaaatgatgtttgtggctaaatgtaagaacagacaaatcattaaacagaaccactgtgctattagcaaagtttatttccagagccgtgcagctgggattctgaactggcagtattccctgagacttctgacctttgcatgagtccactgcttttatctggatccagggtcatggcgagtgcctgggaacttacaggacttcctgttaggtagaggggctgtccttcagcagcacctctcaggtaatcagctcagcctcttttctttggcgcctcctgtatgtctttaggagctggtccactttgtagctctcccaagagaataatagcactgggatatttctaccgaaagagagaggtcatgactttgaattgatccgtcctcaggctcagagcacactggggtgaaaccagggtggcatgtggcagggggagttggctccctctcagagtaaatgtgggacaagattgttccccagatgggggacggtttgaggcaattactgacaggtgagctgatgagcctttgtgactccttgctctctgcttcttggaccttttcatccatttcagataccaggcaccgccattgttcaatcttctgcaacttcacaccgaatctcaattctagggagagtctagaaactagaattcacctttgctcttctccggggaaattatttgtaagcctaaacagaaacgaacagttttccgcaaagcaattttctgaatgtggaaggtaggtaccaaaagcgagaagaacttgctggttttagactccaaaatcacctacactagattgctacacctttgaaatttgccctgctgaccgatgcctcatccctagagaaagatgctcttaggaaaaaactaacacaaaggaattagtgagcctgcagttccttttcccactcttaatgaccttattagagaaattgcaccctgggtaacaatatagataaaatccccatggagttacatagactgaaaatctgattccttgggaaggaaatggtaactgtcagcaatgctcaggtttgaattaaatctgagattgcatgggccatattcttacgtaaacatgaatcctctaatctacatacatttgatattcattttgggtcatctcttctagtatcacattataatgtttgcaggccacagtgtggggtctcaggaagctcgtggtgaggtacctttctttagtggcgcccaacgtgagggagagagagagagagagagctgaagctgttattcagattattacttctcattattattaatcagcatcagtgagagaagctgctgtttattgtaggcctgctcctttcccaggtgtgtggtgtgtattatctccaggtctgagatgatcctgaaaccaaggctcagatgtgttcatgggcctacccgaagctacccagtcagaacaagacacagcaagagtccaagctaggatgttgactcaaggaattttctttgcctttgcatcaaaatcgcagctttagtcatatttaggaaatggcgttttgtaagtattcagttttgagttctgagtgaagtgcatctccatgccaccgctcctctgatacacatataggatacatatccttcccctttcccctcagccctctcggcagtccttctccctaggcaaccgggaacctgctttttgcactatagaatgggtttaccttttctagaccttcctaggaatagaattataatatgtaataatgtacttaaaaattttaatttattctttgataatttcatacatgaatacaatgttgttagatcatagctacccacttgttaccctaacttcctccttagtggtcccattctccccccaacttcatgtcatagtcaacatctcccttttggtcccctcctcttcctcctcttcttcttcctccccactcctcctagtcgcctcatccttttctttcttttccttctgtaagcctctttccctcctccttctctaagcctcactctccctcctttcttcctcttcctcctcctcctcctccttgccttcctcttccactgggtccagttagtgtggccatatgagcatggacataggacaccatcttcaggggcaggcttaactaaccatggctagctacatcattggcaataattcactcttcttctcccagtgagccattaattcctagcagctcctcagctagtggcgggacctcacaaacctcttctctctccatggtggagttctgactagcttgatcttatgtagttcttatgctggcaaacacagtggctatgagttctttagcgcaatgaccctatcgtctccagaagatactatttcacagaaatcttccattgcctctgcctcttacaatctatctgcctccgcttctgccatgttacctgagtctctggagttgggggttagggtcagacatgatatagatgccatatttatggctgagcagtcatagttactttttctctgcatgctggccatttgtgagcctctatactaatagctagctggccacatgctgtgtaaggcgtttttctgatgagatgtgagctgtgctaatttttggcccacagtaacatttttgagcttcactcagatactgttttagttattctcccaaaactttagagttgttttatgagtgtatgagtgtttgcctgtgtgtgtatatgcacactacatgcatgcagtgcccatgctggccagaagagagcaccagatccctggaatgagagttacagatggttgtgagccatcatgtgggtgctgggaatgaacctgggtcctctataagagccacacatactcttaatcacagagtcatctagttttttagcctcccagctcccagggtcgggtttaaagtaagcacctgtgttgtggatttagagatgagctgtttagcctgagtatgcagttcctttagaatatttgggtaaggggtacaagagtggaatctgaagagactggccttgaccttttgttaacttgttttcgaaatgggaataaagacacatttccttgtggacttagtgtgaagatcaaatgagttggttggcagagctggctcagtaggtagaagtgtttgctgaacatgtagacctgagtttgcatcttcagtacccttgttaaaagatgggcatggctctgtgtgtgtgtgtgtgtgcgcgcgcgcgcatctgtatgatgcagaaccaatggcagggaagagagaccagcagattctagagctcactggccagtcatcctggcaggaacaaagagcttcccattcagggaaagttctgaaggcatcatggcagaaagtgatagaggaagacacttgagcccttctccagcctccacgtgagcacacagatacaacccttcctcttcccccaaccagaaacacacaggactgagtcaaacacagaggactgagaacggtgctgagcatggaatatgcgctcagtaggatgtggtggacaatggccacgatgagccaggaggcagcaccttatccacacagaatctcccaaaacttctgctttgaagtaccgcatctaaaaaaaccaggaaaatgaaacttctgttatccgtgaaccagccactctatgagaccctgttacagcagcctgactagagtaaggcaacgagaggacgttgaggagcggaggcaatgccgccagaaaataatggaaaacacacaggaggctttggcattgggtaaggaggctagaagggtttgggtgctcagaaaagtttaccttgtctggaacagatctggaaaagcggttctgatgtagactttacaggagagctgtagagagagccgccgtcttctcagagaccaccgaggccctcctgagcagatcccctacagtcatgatattctgatgagatctttaatggtggggaagaatgttactggaaaatcctgcttaactccccagtctgagatagggtctcacagagaacatgtttgccttcaacttcttccctcctgtttctgcctcccaagtgctgggactttacatgtttacagccatccctgggcctggccagttcatcttataaaaaaaaaaaaccaaatttactgagtttcatcatggtttagtgtttggtggaagaaagaattacagtgaggtattttagctgatgctgttccagagcaaagtattgaaagtatggattgactcctgaactgtagtcttacactaaagtagatgaagagagaagtgacttaaagttgtagttgtttttaagtggaaaacatgcagaatctaaaaatctggaaaaatttaagcctgtctacactgcatacaaacagattatatattaaattatagatataaataaatagaaatataaaaaattcctggcttgtctatattataaataaacaatgagcaggcagccagagaactgtttgatgcacacatcagaagggatcaggtgttttagccaaagtcagagctattcccaagaccatttgcagtaagtaacttctggagttacatgctcagagcacaaggctggggtaagatgcaggacaatttcaaatgatgagccattggcacccacaggacttgtcgtctcttcccactgtggggtcagcttcctgcagccttcagcccatgctcctgagttcctcggccacccaaggtgggctctagtgaactgcagtgcagtgctgttccacattttgcccattctccttagccttggtgcatcatgttcccactgaataatgctgtgttgaaaactacagtccgttctcaaaagattcaaggagccgccagccagtctgataattagaatgtcgtgagatgtggatcaaatttcctttgcttgtttctggtgattttttattgttttgcttgaaatatttgttacttagtggctgggcttttcacataacaatgtcattttggagcaacgagggatatttcagaggcctgggtctgccaagggtggccagggagaaactggaatccacttgctccatacagcgctctgagctgggcagattttctttttcctgtcagtcctcccccctcccatctccccattttcaccactgtactggctggttgacacaagctagagttaccatagagaaaggagcctccctttaggaaatgccttcatgagatccagctgtaaggcatttctcaattagtgatcaagggtgggagggtcccttgtgggtgctgccatcctgggctggtagttttgggttctataagaaagcaagctgagcaagctaggggaagcaagccagtaagtaacatccctctatggcctctgcatcagctcctgcttcctgacctgcttgagttccactcctgacttcctttggtgatgaacagcaatgtggtagtgtaagctgaaaaaaccctttcctccccaacttgcttcttggtcatgatgtttgtgaggaatacaaaccctgactgagacacccagtgtcctgggcttcctctcccctccctctcgctctgctctttcatctccattctttcccctctttcttttgtacccatttctttctcaccacatcatgatctcttgtctttctcatcacagtctctgcctttctcatctctcttaggtacccattcttctttaaacctgtcttacatttttacccattcaaagataaaggaagtgccaggtatcgacatcgcttgggtcttatggaaagcctctagaagaatcttgtggctttgccctgttgctacttttccctgctgtgtgcaagggcaggacagggacatccccgtgtatctttgttctgtctatgaagcatgggtgaaggcctctttctgtctcacgcatttgttccatcaacacacatttcctgggtatttattttatgtactaggcagtggctgaggcactgagcagagggaaccaaatcgctctcaaccaaccggggtccttgccatctgcttctttaaactctgtaatgcaggcagacttccgtctaattatttgagatctctctagtagtccctaaaccctccctaggtgtcacccggaggtcacccagtttgtagataacaggcatgttcatttgccgtctctttcctagaaggtccagcaacttgctagtacagtttgaaaaatgtcaatattttgatctgaaataggttttaggtgcaaaggaggttgcagaatccttgcagagaattctttgtaccctttgtttggcttcccctaaagacagtatcctgcatacttagaattcattgtcagaattagaaaattgatgtgtaagtctgagactgcttttattaaacccctcccttgcctacgtttttctcttctcccttcttcccgtctctctcttctcctttgcccttttgttctcttaccttccctgattcctcttttccccttctctttcctcccactttcctttctctctccttttctttctctcctttctttcttccctcttcctcccccctctctccctccatttctctccctagttctaggaagtttaattatgtttatacatttagataattcccctcacagtcaagcagggacagagctgacccaccccgtcaggaagttgtctgggttactgtttaacaaccacacaggtccttgtctctaacccctggacaaccgcggatctgttccccacaaccgtaattatgtcatttcaagaacgttatgtaaatggaaccagacaatctgcagcccttggagattggccttgttccctctgtgcaatgccctggcggctcatcaaagttctcacttgtatcaatagttcattttgctctcactttttaagataaaaggactccagcataggacacttgagcgagaaattcttttgtgaaaatactcattttgttttcaaagttaacctttgcggggaaaacatctctcccggctagggacctccagcaattaatctgagtttgatatgcaagtctgcaaattggtagatgactgttatttttatttgattcgtagatgttgtcctagtgttgaacaactgccccctcccccaaagtgggttcccagttttgctttggattcattataggagtcttccttcacctgtaaaattgtctcttgtattagttaggttagtgccaggggctggaatgaatgggtctctcagatagaaactttataccttgtttaaacagcagagtatgtgaccaggcctcatctttgaaaggctttgctttataaggtgatttggagacacgggtccagattttttttttcattagatattttcttcatttagatttcaaatgttatcccctttcctggtttcccctctgaaaaccccctattccctccccatttgccctgctcactgacccacccactccctcttcctggtcctggcattcccctatctggggcatagaaccttcataggaacaagggcctctcctcccattgatgaccaactaggccatcttctgctacacatgcagctagagccatgagtccaccatgtgttttctttggttggtggtttagtcccagggagctctggggttactggttagtgacaggagcctgatctagctgtttcctgagaggctctgccagtgcctgacaaatacagaagtggatgctcacagccaaccattggacagagcacagggtccccaatgaaggagctagagaaagtacccaaggagctgaaggggtttgcagtcccataagtccagatcttttaggtctttgaatctttatgcagcatcacatggggaagcgtgtggatggggtgggggaggtgcactgggtttgcagtttacacagatcatgtgtagaaggccttccatctcctactgccattccagttttattgttagcactcctaagatatggggaaggaaggacacacttctttgtgggtgaacacacccctctgattgagcctcatacatcggaaggaggaaaccacagtactttggtggatggctatgttgggctccaatctcttcaaaaatccccatttcaacttaacagctttgatggcagttgtaatgggtaccatccgggaagtcacattcttgatctggacctccctgtgacagtgagattcactgttgcccctcgaaatgatctcggctcatttccgtttcctcgcttccccgtattagcgaacaaattagatttcagcactgaacaccgtgctaagtttcctgaccttggacaaatggaaagttctttctgggatcctggctgaaggtgggttccataaatctgggctagcctgttaatccaaccccacacttactgttatccgttcattttgaacctggagactaatgaaaacacaagcagccccgagaccacacagcacaaccgctgtcagggccaggaggcgtttgacagtttagtcctgagagcactaaattcagcccctgataaataatttactttgagaactgggaagctagcctcactgtcttgcctagctcgctgcttgaggaatatagaccattctggtcatgctagagaggagagaagaagaaaatttatcttcctcattccctggctacctatctttcatgtctctacaaccatttcaagaaagccatggatttctgtttgctagtgcaatgaatgcctcatttccagtttgcttgcctcttgcctgggctgtaatcacttgtagctcggcctgtcagggtccctgggaagacttcatatgggctcaccgtgtgctgatggatgctgagtttatatagggtaaaaggggagggggagatagactcaatgtcttcttaccacttcccctgctccttaattgacagggcctggcggaggccacgccagccttgtgagtttccaagtcaggtttcatttcgggttgtacctatcacttcattttgtgtttcgtaggttgcttttgtttctgcggttgcttttctccatgcctgggggacagaatagctcagctatacatttagttctctgttgtggaggtttttcaggggtcggcacaactctgatgctcattaagattaccaagcctcatcatttttaatgttaggcccaaggtaatagttaatgaggctgaaaagtatattaataaaatcgcttgtagtaattagcaagaaattataatggtagggtgatgggccgattttagaaatcagttaggagtgatcaagaccaagctcagatgtcactacttattattttttgctttcaatcatcatgaactacacctttgcatttttatctctgaaaataaagcctttgattgagctcatgcatattgcgatcaactcaatctcttttgttcccatccaaggagcatagagacttgggactagatggggcctctcgaataattcacaaactgtcatgctgccccctagaggcaagtggcttcctagctgagagaagctgggtgagcccacagagtcacataggcttctgatgagaggagacccaggaagcaacatcagtggggctcaccaactcagaagggggggtgtaaaagcaggtgcctgtaaggtcacagatttgggagacgaaaggctggggattgaaggcttttggaacatcccccagtttaatctttctaatcactcttttctaccagcctctgttttgtgtcacacgtgtgtttggatctaaagcttttaagttatcccaggctaaagccaggacttcccggacctgcctagaccttcagctgaagcttcttggagtttttcttgccattgcccctgttagtaactcagtatccttattatttaattattattaatgtgtgtgcccgtgagtgccaacactagggtactccagcacaggcataccccagtgcacaggaggagatcaggagaccacttgtgagagtcagttctctcttccaccctgaattctgagcaccaaactcaggtcatcaggcttggtggcaaacacgttcattcgtcccctaagccatctccctggcccacccatttacttttgttaattcctttgtgcctgcccagattggaggagtatctgaaaaaaatatctaaagaagatcaaagctttagatattcagacagtattgttgttggttcatcgaatagtgatagactcattgaaatccacttactacgtttttctcctctttcccatccctttctccaccacatttactgagaacttgggatattcaagacaggcttgcgtgcaagttcctaaggatatagaagtgagaagacgtagttcttatcttccagaagcagccgctacactgctttacatggggatctcccacatagcttcagctgccaacaagacacagctgaatatcggagagcgtctcacttggggattgcctcaatcagattggactgcaagcacgtctttgggcattttcttgattgctacctgatgtaggagggcctaatccacttcaagctgtactatccccacacatgtgagcctaggctgcataagagctagctgagccgttcagagagcaaaccaatcaacaacctcctctctgtggtttctactttagtttctgcctccagattcctgcctcgagttcctgccccgatatccctctgtggtagactggaacctagcagtgtaatatgaaataaactctgtttctaggttgttttgggccatgatgtgtatgcagtaacggaaaagcagatcaggataggggtacgtagagatgctgaataaagggtggaaggtttgaattatgcgaaagaccgagaaaggcaagggtaggcggtccaggcattagcaggaggcttctgaagcttgtgggacccaaggagcttgcaaagttctatgatactgcattgctaagcatctttagtggggtggggatggtgggctagtctgtctgtgtgtgtttatatgtgtgcgcaagcacgatacaagagcgttactcttatcttgatagtggagcacctatccagggttttagacagcttggctcgatttgtttgtagaaaaaccactacagtagctggtgcttttctagaaagagcccagtggcaagggctgaaggaggaggttgctgccatgctccctgctgccatgctcctggtatgagcactggcacccaggggctataaccttggagagaatgaaattgagtgtgtgctgtttgtacttgttcaaagtggcctctaggattgagaatagctctctttaccttgggctcaagcatgtttattccaagtgtccttcaaagcttctgtcctgggtcaggctgccccctgtggccctgtaacagagagttggggatgggggagaacagcaaacggctgtattaaaaacattgtcccctggggtacagctagagagaaaaaaaaaaccttctcgacagaagctactgtggttaatcacattatatagaaatgcccgtggtaagaagaggagataagagcccatccacagagaagctgtgctgtgacaggaaatggctcagatcagaaccccagttcaactcttctggcaggactttcccagccatttctgatgaatgtgtaagtgttctgtttgataatgatatctatctgctcctggatattggtctcgtttcttttgctggcttggtgcttagtcaacgtatggatttacaaccaaaaggatggctttgttagatcagtctccacacagaacagagagtggtagagaagagggagaaggaatcttggaagagaagttgggacaaaggcggcgatagatagaaatggaatcgtgacatgtagccttggtgatgagtggatgtttccgaagctcatccacatcacagcacccattggcactagctcactccgtcccacactaaattgtattctgcttaaggtgcacagtgtgtgtcttcagaccgagcagctcttgtctgacaaagagtgttcggaatcttgtagactcggacacaggctttatgggttgatcatccctgatctgaaaacctgaaacctagaatgctctctgctcttcagactggggtgatcaattgatgccacattttgtttgctttgttgtccatcgatggacacatgggggaatttccatatttggctgttgtgaatagcgcttttatgattacatcatgtacaaggttttgtttggacacctgtgctcaattctctgcgagtgtagatttagggctccatgtgttgggtcatctggtatttctgtgttgcacgtaatgaggagctaccagaattgacacactatagaaacgtaagtatatcagtgagcgcttaggtttaggggaagtggggggctttggagggtgatagccagagggtataggatttttctttgtaatgaaaatatgctaaaagtaactgtggcgaaggttgtataaatctgtgaatatactacaaaacattggaatataccttttatttaattttataattttttttctgagacagggtataactgtgtagtacaaactacaaatttatgatcctcctgcctctgactctgaagcgctggtattacaggtgtctgccactggactcagctacactgaactgtttaaattggtgaattgtattgtttataagttacatattggcatatcattttttttttttacaatgagcaagcaaatgaccttattttatctgaaggcttattttttattttttaaaattttttggagggcattagtgaacttgtaaatccaaatataaatgtactgttagagctcaaaattatgtatttttgtctacttgtctattgataaaacaacaaggagagctcagagcaaggacgcttttgtctctgtgctgtgtcccagacccttgcaaggaccatgaagtgcactagctgtccctacatctgtggtaagtgagcaatctgcccgcagacttctgggaactgatttatagctcatgataaaggcttgttttacagaatagccatggtcccaagtctcagatttagtggtttttgtgttcatttgggctatattttgagtcattacccttgctgggaggctgtcatgaagccaaaggctttgacatcttctggggaagggaggctagactgccaataagtgggctatcttcaggtacattgaggataacatgttaggagactgagacttctctagtacctgtactgcattcaggccaacttctattcatttgtttctagcatcacattaatccagctatcaagcataggttctagaaatttgattcatttacattgaacctctaaagtataaaataaaaattaccatgaaatgttgagctttaagaaaaagtatgctacatttttaagtagacattgaacctctaaagtataaaatcaaaattaccatgaaatgttgagctttaagaaaaagtatgccacatttttaagtagaaatatttctaatagttttttactcccttgcaaacatatagtttcagctggtaaaaggtgctattaatagagtagaaatattttgtttgctagtatctgtctgtctgtctatctatcatctatttatctaaatatcaagttacctacctatctatcctatctatcctatatatctatctatccattcatccatccatatatctgttcacccatccatgtcatgcatgtatatacatatgtatctatctattctagttttctattacctatctctactgtatgtatgtatgtatgtatgtatgtatatttccatccaatttgtatatcatctatttcttctgttatctatctatctatctatctatctacctatcatctatctacttacttaatttttgcctgcaatgtcattaggacttaatgaaccagccccattaggagttgtgtgtaactcctctttttttgcctatatgtacaactttggatattcatctctataaaatagttttgagctcattaactcatctttcccattggatcagcttctccagactgggtcttgagtgtctccctaaaaatctcatgcattgaaagactagttctaagctcaaggtggggctaagaaaagaaagttaggacactggaaatgtgctctggaaggggatattggggctctaatcccttcctccttgtctctctctgatttgtagttaccctaggagcagtctctactgtcatgtgttccttccttgatgtactctttcattataggctccaaaccaacaggcccagactgaccatagagtccaacttaacaaactgtgaacccaaataaactttccctcttttaagttgattgctttggacatgtgttacagaaatggaaaactgaataacacagtagccttactttctcattggtaaatgtggcaatcataaaagattgggctgactgtctgacataagctatgcacaatggttagataaggctgatggcccaacaataactcagcaagggttagaaatcactctaatctgcagccactggctcaggagcttccctgactgatctaagattacacacggaaagtgcaaaggaggctttctaagctttcattgagttgggttaacaggctacctgctgctatctcaagcatccttagacagcaaagacgacgcctgttgcccccaagagactgaagcttccttttcagagcaatttctccaggaaatccttaaacagaaatataaaggggcgtgaggattgagggcttcaggacagtggcatcatttggggtttgagctcagacccagtctgccctggtcagtgtgtctgtccctggtagtggtgatcatactgagtggaacctgaggatagcatgccttagttccccatgccttgggtatgtggacacctgatgacaatgaggctgcaaattttatgccacggtttatagtcccggtctcaacttccagccacctggggaatacactggaattctaaattgaatgatgggcttgcgttttgaactttaggaatatttctgtctagctgtgtgctaagttttgactggacgtcaacaatttctatagatacagctacggattcttcattctttgctgaatattaatttttccaacagaagactgacaggatatcttgactcttaggaatttcatgttaacttttccctagctgtctgcctggctctcatcagcttggtgcatactgtgaggtgagtggttttctttgcccgtgtttctgggctgagagctgagtggtcgcttccgatgggattcttaacatgttgcattgtctcgttcgcccatcagttgtcagtgttgacagcttagtctgattgtgctgtaggagtcaggccaagtgggtcacaggggcaagtacagattagatgtgccgtcttgatggagggtggctggcggtgctacacaaggaccttagcaaagatcacctgcagaaagacagtggttggttagagcctctgttctcatggcaggtccacacactttgtcagccccggttgcctctcagttgtagaacaggtagaaaacacacgaaagttcatcaacacctgaaaaaagtaaaaataaaatcccaggaaacttttgtaaaatagttcttagattcctccttgggaagccccagcccccgtcgtttgtgtctgtgaacgtctctcagattctgtggtctcctccaatggacactacttgggatcaaactttggtcctttcatggtgttctgacactgagtgagctcctttctagatggtttttaccactccccagtccaaacagtgaacacatggcctcttcagggctgtgttaagatgctgcaccttccatctgatgacaacatccctttctgtctgccatggcctgttagagtctgccgaatgggtctcctcaatggattgactcccactagcttcttgagccaaggaaccatccctggcatcagccttttctatgcactggtttcctaggcatggcctgttctcacatgctaccccactccaccttctttcttctgttttgaacttcctttctctctttttccactctgtctaccaagcctgctcctgtgagagggtggccatcttccttgagcgcaccttcctacaagagatccctgtatccaggcagagcctgagactctcttctgcattcttaggtgttctttcttattgtttttataaatgattagtgccctgattttgtgttttactcacgatccacacaagagtcttgtgggaaaggctctgtcttgtgcgtatttacactccggagacaaggggtcagtgtgtcacagtggccatgagatagttgccggttcaaactatacattgttttgtgtgacttcaggtgatttttgttttgttttttttctcaggctggattttacattagaaacagcacagcatctatttattacctgggcttaaagtggggtccacctaagtaccttttgcacactggtagctagcagggtgggatgcataaatgtcacctgttggcatcgtgattgccattcctcagtggggtctagaaaatgctagaaacccaaattcttgactaatagaatattgtagaattcccattttctctgaaatggagttaataaaacattatttttctcatgtctctctccccagtcctcaaaagtgaatgtctctcagaccttagaaaaacactttgcttgcttaagcgtctcaggaacatttggaagaaagccactttgcccaataagctaatagctaaagtcaggattcacctccctgctggttgattgacaccccatttcctcctcttaaaagaactaaatggcctatatttcttttttaaattaaagtaaatgaaaatgaatttccccactcccctggagatgactggagacacactgggatgtcaaataaaaaagttgggaactgctgagctcaaactcagcactgtgggttcctgggaaagatgaaacatgagaagcacccagcgtggaagaggatggtggagggagaatcggggagacagacagattctgccttatagagatggaggagactagaggggaaggctgtatggaaaaacagctatagaacaaatgatctttaacttcagtaaaaagaagcaaagataacccaagatgcattgaataattacccaagttattcctggccaccccaggcatgcttcctcaccatgcaaaaatattgaaagcagaagggaagtgattggaactcggaggtgtctcagttctctgactttgctaacaagatttgagcccgttattcctgcctcaccatgagccttctcagtagcagaacctcgattcctgagggactgtgatggagttcatctgagtttaacaagtgtttattgaaacccaggatgtgtctggggccaagattggaactatgctgcatgcaagatgcagatgactagatctttagcccagaggaattcctggtgaggtgaggggaaaggctggagagttgtttgttgatgtgtctgcccctagcttctacctcagttcaggaggtgtgcctccttaggtcaaagaggaaacttctcagtagtttgggggttttggatgataccactagtgtgggctcctgagtgcttcagtctgcttcttgccacctctgggtctttcttgccaactacagtaattagcccaaattattcaacagaaccaggcagccttttcactctctgcagttgatggctctcttttgcacctggaaggaaatcaacacaatctaaattcattagcattgctttgcatggtcctggcccctgcctacccctgtctttctctctttgtaatcagatttcgccatccccccaaccctgcagccttctaagagaacacactgcttagtcacagaatctgaacttgcccccaccttccttctccctgtctttgtcatctataattgctattggtaattattatttgtttccttattgtccttcttgttcttcagctacgttgtgagctcacaaaggcagacagagcacatgcctttctgattctctgctttgtgcccagaatgccaaagttgctcaataaacaactgagcggaagtactgtggtactttatctgccctttacaggtggatcaggaacaaatagttcccaggaaagaggcacactccacgaaatgtcccttggatgttcttgtttgtgttgagggctctgtctccagctggtactgctattttgagtgtcagtgagaccttaggacaccgggtgtggctagaggcagttgatcactggagtgtgtgactttgaaggatatttggggactcttgtttcttcctctgtctacttccttattagactactgggccatgatgaggtagacaagttcattcttccacaccctcctctttccatcattctgccttgctgtaggttgatagcagtggggcaagccagtcatgaagtaatccccttgaaaccatgagccagaatatgttttgcctctcttaagtttaattgccactcccccctccccttatctttcatagtggcaaagagcctgactaacacaacgtattagggaaggaaccattctaaatcaggcatctagagcatgttttctggcccattgtttcagggctgcctgattttcaaaagaaggaatctttaaggattctccctcctggatctcaaaattcactgagtgtaagagctcagagacctagcattctgttgattgacagctctttggccctagcctgccccagaaatgttttcctgaagagacagttctgcctgcctgcctgtctcgaggtgatgttttcaggcttaattagaggctgttaccccttcttaagtagtcatataccagacacgccaaataaccttagcatcgagtgcaggggtaagagactggaataacaatttgatttcaagtacttaaaagccaaaggcctctacatcacaatcgctcgcttccttactttaacaagttaaatgagttctatatgaatttttaaatttgttcaataacgttttattgagtctccacattgctcactctgctggcccagaagctgtgggaggcactgtggaaaaagactccctgctactgagagcaattgaggatgctgctcagagccttctgctcaccttcctgtgtttaatccttgtagcagctcccaggagctggagctggagacagagtactaatggggagctgccttggctgccaagacttgactctaggcctgcaacgagggtttggttcaagcctgcttcacaggaagctatactaggaggggcaacaagaatgagcaactgcacagttcactctgtgctttgtctgtctgtctgtctgtctttctaaagactgtagctatccctagctaatcttcatggcaggcaatatcctctccaacctgcagggctaccctggcattgaagcattcaggtggcctccctggatgacaggtttctaatgagactgttacttgagttttagggcaaatgctctgaattaaggtaccctaaccaactggctagggattggtcccccatcccatatgtcaatcgaagacatgagtggtggcaaaagccgatggaaaagactggagaaaggaaatccagtcagtgtagtatattgggaagaggcccaaccagataacgtgggccaatgcctccaagcccatcttggatattaacacgattgtagacttcaatagaagtagaaagggcaagtcaagggtcaaggtcaagggcaagaagcatgttgtgactgagcagtcttggtcatgctgtgatcatttctgcttctgaaaggtggtttcaggggcttcttcttgcttaagaggacatgctgatctcttgcctcatttgtacactcattctctgtatccctgttcctctcattgtcctacttgatctcactgtgtagtccagactgaccccccaattgttaaccaaggctgtccctgcgctgcttctaccccctaagggcatgagtctgttggggaacagtccacattcaaactgtaactccatgggaagaaatgcggttgctaggagcttggtgtggggctggccatgtatcaactatacttttgattttaagtcttaccagtttcgattgttccacttgacaaatagagtccacactgtaactgtggttatttatttgttaagactgagtaggagggtttaaacaaattacttacccatgcctactgctcagtcacacacagtggagtatcagctaagccctagttaggacttgcttttggtatttggtactttgtttcatagctgagacaaagtatttgacagaggcaaaagaaaggaggaaggatttcttttggctcatggtgtgatggtgtgatgggatgcagtacatcatagtagggtaggggagggatgggatggagtttgtggcagtagagcctgtggctgaggctcctcccatcccaggggaccagagaacagacagctgaggtcagaagcaggggtggtctgtaactttgaaagcttgtccctttgtcactcatagcttccaatttggccctacttccttaaatggcttacagccccccaaccagtaccacaggctgaggaccaaagtacccagacacatgagcctgttgggggacattgtatacttaaaccccagtactgtttttccctctttcctctctcatgccattccttatgtcctttatgggtttctctggatatagagccctttgatattttttttttctgccttcggtactgaaatgaatcagtccctcatattggcccaatcagtgcatcccatcaggaagagaagtgtccattagtggcctcagactcctgccaggattggtgggttacagttagtattgataactggtagcacagctggctgttaaaaaacgttccttatcattgatgactatggacctggagatcaagggaccattgggtttttcctcaaccctagtttcatggctgtctttattccatccattgtttcaatggtcacagggaggagctacttagggccactacccaggacacctgtgcacaggacaataagcactgaaattcatgacctcgtctggatggttgtatgattagagtaaagacagggtagaaggagaccctaggacagaatcctttattatgaagagctaacaggctaaaagcagaatctagagggagggagggagggagggagggagggagannnnnnnnnnnnnnnnnnnnggagggagggagggaacagcttagaatgcaggagtctgtgatactggaaatacagggattgggtagatgagggtgggtagatgtggggagggcagaggggggaaggcagagggggggacaggtggatgtaggggtagaagatactttctcactctcttggcccgaggcacctctccttgtgaggtctttcttgtgcttgactgagaagacaggcagatttaacatcaactgcgggttatcagacctctgtgtgagaaggattctaaggtcaccagggggagtgcttcctgaggcagagatttgtgggattggagtattactgcagtcaaggctgtgcttctgtctctcctgcatccaggatctgttgttcccgggagcccgtttttcatttccagggcagagctgactgttggctctcggcaggacaagtttgcctttggacgatgatgtacagtatctgagcatactgcctgcttagtaaattatccgtggatcactgaaggatggcacactttaaatttgcagctcatgaactttgtggagcatctacagtcctgaatttgcaaagggaatcagctccgaataagcaggaaatgggcctactatgtgccgaggccatggcaccgaaggtcttgaagaatgtctgtacttgacaagaggtaggggctaccttttatgagcacctactgtgtgccaggcctttggcacactgtgataatccttacacagttctatgggaaatctttaataaaagtaggaagactgaggcccaagaaggtgcagggacttgatgtaggatagacacttgtaagtgacagcctagatctgatccaggcatgattgacagcataaatctctcgtttctgttgagtgacaaacgtttagactaaggaaacatttttcagcaaagggctgggtggtaaacattttaggctttggggggacagtacgtttttggggacattacctgtgttcagctttgttacgttagcaccaaagtagccagccattgatactgcgtaaacaagcgagttcagttactgtgcagtaaaactttatgtagtaaaacagatactgggccagactggggctgtcggccagtttgccaagctttgatttagagagtctggccagataatggatgcttggttggcccagatcaacacggacagcgagatttaccctctcactgtaaatggttctcggaagaaatagatctgcacagtggcctaagccgagagatcagtggcctgtgcctgccatccctccactgtcaggaccctgccgggtatttctcccaagcagatgctgcctttgagggcacagggtaggcttctctgtgctcaacacatgagacctgtgatgtaggtaaaagtaagtgaaagaggggtaggaacagcacagtttctgctctctcatccccttcatagaaatttcaattctgaaactaatcatcaatataagaacaccagtgtgtgtatgtgtgtgtgcgggtgtgtgtgtgtgtgtgtgtgtgtgtgtgtgtgcacgggcaaatgtgtgtatgtttgtgaatgagtgtggtgtgtatgtgtgtgtgtgtgtgtgtgtgcacgggcaaatgtgtgtatgtttgtgaatgagtgtggtgtgtgtgtgtgtgtgtgtgtgtgtgtgtgcctgggcttttgtgtgagtgaatgtggtgtgtgtgtgcacgtgcatgtacctgtgtgtgcctatgcttatatgtgaatgaatgtgtggtgttgtgtgtgtgtgtgtgtggatgaatgtgtgttacatgtgtgtacacctatgtgtgtatgcctgtgtttgtgtgtgtatgcgaggaggacatgctcacctgtaatccaaaggctggtgatgtccaatgtcagtgtttctccatcatctggaatgcactgatgtgtctttgctgtcgcccagcaggctccagggatccacctgtctctctgtctccccagtgctggggctgtagacatgtgtcacctagcttttgatgtggctgttggtgaactgagcttgtgtccttacttgttcatggcaagccccttgtcaactaagccacctccttggtccctcttttgtttgtttgtttgtttgttttttctgcttccaataatacattccccttaattttggagtctttctgtttatccggcaataactctcttggcttcctgctggagctagtacaggctttcacaccagaaaagattgttcctctattattataaaaatttaaatttcccaataattctcacacatatattcttccagaaaaaaaaaatatttagcacaattcagccaagtggtgtgttccttcagaatcctgcctggactttgattagatctgcattggacttgaagattactttagagaccacgggcatctttagaatgttgagacatataaataagtcgtgcttcattttgagacagggtttcgtgtagtccggtctgggttttgaacttactggggatgaccctgaacttctgaccaaatgctgtccccagtgctgccacacctgttttttgcaggatggaaacccaagctccatgtcttgctaggcacacacttcaggctttcaatacatccctgtcgtagcacgagaccgtatgtttgcctttgctcacatcccttgtgtgatgtctcggcaagttcgagtgtcttctcttagcttttgcgcacctcgtgtttgtttctcttgtatggggaactaactgtttctagtatgttttctagtcggctcttgctgatttaaaactatgtgctctaaggggcccagtgggcacagtgcttgctctgcacattcgcatgagtttctagcatccatacagaaagggtaacacggtaatagatagtatgtacctttaatcccagcactggggagctggagacagagcaacagccaaactgataagctccagactcatcgagcgatcctgcctaaaaaatatggatgtatggatgggaagtggttgagttggacacctcatgttggcctctagactcaaatgtgcacctgtacattgattcatacctgcatacacatgtacacacatacacagtacacacacatgcataccccccccacatgcacacacatacaaacaaacataacattttaagcatctattttatatctggatccagcactaagattcttttattaatcatgctcttgaacactaagataaatgattaacgtcctctgtaaaaagcaacttgccttttcctttaaaaaaagttacagtaatttggttttgattatttagcttcttttagaaattccaggataaggttaagtaatagtgataatagcagacaattttttctgattcaattacagtacttcttgaattacattaattataacggctatttcttcaatatacacaatgtgtaccatgtagtgagcgggcattccaattacttttattgttatttattttttaattatgggactaaatgttgagatcatcatgtagttttacccccactgacatattttacttttacagatgtgtaagtaaattttcaaatattaagccatcattgtaatcaacttaaattggctttttatttcttcaatacagtagttgatttgatttgctagcattgggcacagcttctcaatccgtcatcagaaccatgtttatgattggggctccatttgaatcttgggaaggtgctgtgatgaattcattgtgtgtattatgtaataaccatatgggagtctgctaacattcccccttccttaaatatgctagtatctatgcaaccagatacacaaatgcaaagtgaaatcagagcatagacaccatgaacaggctcaaagtggggatggccacagaggcttacgtcagactttctagtttctagtttgtagtggtgggctccctcccagaggctcttaaaataagaggtcatgctgactaattcagaactgtgcccaggagaagtggaccaacggctagaagaatccaggagaataagagttcaagaattgtcccagggagtgagtctagcttaggtgcatgaatgaggtaggtggctcttcatagctgcctgctctggacaaggaagctggactatttataccccagcccctcagcagtcaatgtgcccagtagcagtgagggctgtgtggggaggcgggttacactgatagtataggccactcccacagtgtgagttgtggaaagagcagagcgcagaacctttgggcattcagaatctggataagagcttatattttttttttgctctgaaactctccaaatgaagagagactgttgctttcttctgttccctgctgttcggcaactggcctttgccagcaccttgagatgtcagggttctctttctctgtcgctctcttggttggggagtggctcagagcacctcagaattgactttacttatttctgtaaaacaagcaagcaaacaaacaaacaaacaaacaccaaaacacaaacaagccctgcttttcattaggacctggtatattccttacagattttcataaaatttgagtaacacataagagatggagttacatattttttctccttttcagcgattcaaaggaaagctattgcttaattagtggctgctttactagttcctggtccacaatagatgctcaaacactggctgaatggaaggatgaatgggtgttgctggtttattgctccagttttatgaaattgatttttttctcctttgcaagagggttagttctatggttttatttttaaagaatcatctatcacatttatctgtactattttgatttaaaatttctaattaattaaacacttcctgaatgttattcattttcttctgatatatatacatatacatacatatatatacacatacacacacacacacatatatatatatatatatatatacatacatacatacacacacacacacgtgtgtgtgtgtgtgtgtgtatactttctagcttgtatttttaaggatttatttgaagtctgtcaccatgtggttatgtgcacactagtgcaggtacccatggaggccagcagagggcagcagatcccacggagatgtagctatggggcattctgagctctctcaatccctttatatatgttataaacctacaggttgattagtaagttttttttttacttttcttttggtttaaaaaaaaaaaaccctcaatatatattcagctttggttgcatctctaaagtctgaaatggtagtctggttcccccccccccttctaattattctatagtttgtttgtttatttcctcctcaatgcaccaagccagtgcattgttttctagttcttgagtggtgtgagttttaaaacctcgacctttcatacgcaatgtcaaatttattacattgtgatcatagactatgacctgtatgatttaattaggaggatttatttttgtttagttcttataaattctaaaaaataaaaagcaggatttttttcttcctttcctctctggcttttaccccatacctcatacagtttaatgagagatttgagaacttggccttctcaccagcattcagtagaggatttaattatttcatgggtcaggtccttcttagagtgtgaccctataaaaataacatgtgatcgatatgaccagctcaggcaatttcataacacagattagaacattaaatgtagtgtgtagtctttgactctgttgactcgggaggaatcatcccacaaggaactgttcttacgagcccctttcatctacccacttaggatccgtccccttactggcagggccagtctttggttctcagacagtagtagctattacttttgtagactgccaatttagaggtagatcaattgcatatttaccaagacagacccttccattttccatacaggagcatacatattaaatcattgcattatggttatggtgtgagactgagtttcaatataggtggtttttctggacttttccgaaactgggctgcatcctgcagtcactgtggaagagagacttgacagggatagtaattaaccttgtgcaaggttaaactgatctgagatgctttgcatttgatctccagacttccatagcccaggcacacctaaaactgcctcagccctcagctgttatctttgatcatcgggcgtttgaacagcacccctgtctcttatttctaccagcttacaacattgctgcgaagaaaagatgagagtggattgaataaacccattgtcctctacaacagaggccagaaaagagcatcctggtaggtaaatagcacagcagcatgtccaaattgccaacatttttataaataaagttttattgagtactgccacacccatgtttttgctccacacctgcatcttgtgctagaaaggcaacattgagcagtttctcgggaggccacagggccacacattttgcaatatttattctcttatcttctatggaaacagcttgtgactcctgatgcagaaaggcagcatcaagacagaaagttaacacaaacccagctgttctgtgctagcccagagatccatgtgttcttagtacagtaagtccttttcctggatagattttaggccttatgtgttcttgctgaccctgtcagctcacaggttcacaggtttgcctgcgagctgactgcagtgatctgtactgctgggccccagtacctaagaactcttgaggagtgagttggtgttaggcacaccgacgacaagctggaagggcagcaaccaagaggacatgtggggaggaaggatcataaataagtacagatgagctttgggtctgtagagcggaggtggggaaactgagtttgggcaaacatgagaaggggaacacgagtgtcttggtctctcacattcctctaaatatttacagcatcaaacatcttcattcaactgttttgggatttcagccgtagggggttctgtctcctttgggtctctgaaccctgaggcagtttctaaagtcttcgtttaacttaagatctttttgtaattagggaagctataacatctaagctttatataatctcagcttctggaaaacccctttgtgcttggaggacggtgtgggtagcgatgggagggcaagctctcccgttgtctttgacagcccacaccaggcctttctgtgctccctggtctgcctggagccccccaggacacatctagaaagtactgtcatggcaatcctgagctgggctcagttcctagtttgccatccgtccccatctcttcaacgtgtgcctgatgggggccactgcttttctccccattgccccaactgttgtgtggcccaagctgcatgctaaaagtctgtatactctagccctgaaattctgtggtcatgtgactgtttactgggacaatatccactgtcagctgagtttgctagaaacatgggtttcttttaaaatggggacacagccaaggatgtggcctccaggacagagaccattgctcggattctctttatctagccctttggctggagcaattgaattaccgactgagccccagtctccccttctgtaaaaggagcagaggtgctcttttccacattgccgaaaggatgtgaagacagcatagggagaacctacaggtgctcccatgcagaggctcctgggtcagctgtcgatttcaaccctggctgcctcaggtgctaaatgacccctagactgcttaatctttgcttcgttgttttctgtagcctttgatgccctggccccttcttgctagcatctaactccattttcttttcttatgtgtacttcatctgttggactccttgtaagtttgggggtgataaaattaccttattaatcattcctttgtaaatactactgtgaaacaaggggatattgcttccactcatcttttcattattatggtaataactttcaatttataactaattaacgttgctcctttctaacccggccttcattacaggcagccagtgaggaacccagaagttgatgcacagcaagcaggagtcctgctgctccctgcactgagggataatctctcgaaggccttcatttttagattacaggtggtgagagacttctttccatctgcttatgtctggggctcaggggtggttgtccatctcctgccatgggactggctggtgtgactgagtctgcggagagagaaggcagccggcaggagataatcagagactacaccttgggaagagcaggagatgcccagagatattctaaaaacaaatactcaaaggagcatagatactgtcttgagaatgatgctcccaggacctggatttgttctcttgagtccccagggagagatccaggagatatgggcaggagtctgaaggaggcagtgtaagggatgtgcttgctcctgtgacagtcacagctcctggagtagagcaatccttctaaggaggtctcaatcgctattcccccctcccttgagatacattcaagttccttcaggtttaaacccctgcggcttggtgtcgtttatagataggaagtcattcagcagaacttctaggccccctgaaattctgtgttgcacaccgtgtgtttccattgtggagaaactggctagaacgggtgttagacgtttagcctagctaccctgtgatgtcaggtagtgttactagatagaccaacagcatcgttctgctgcaggctgatgtagaccaccgaactgagaagacttggcaaataaagggtggggtggggtggggtggggtgggaggagaggccttaatgacatgcacagatcctctttgatctcaggcatgaagcagagagtaccaaccccctcctgctccacccggggctgagataagagactccagttcccctgtggacttttctggaatgagactcattagctttcctctgtttatgaagtgaacataaacacatacaaaaatggtttcctttctcccttctggattaattatgtgtatttactcctcttggattaattaggtttatttgctacttttttttttttcaataagaagatttgggacagtgggtgaagggcacagagaaagtggatattgttgaagctttgatacccttcccagggtccctaagcagcccttccttcgtaccctgtccaatagaattggctccggtgatcgaggtagtccacatcggatctgcacaataggcaggcactgcagccactgagctcatgagatcacggagcgcgtgccagtgcggtggagcgggtcgactttttagttgtatttcactcggcattgaagggattcagagagaaagaacagaagttgagtcaaaccattcccaagcacagaggagaagaattacattgggaaggaagcatctggaggggcttggacgtagccagcgctcataccatgtgcctgggggtaactggcccatcgtgccgcaactctcaggtcacatcctgtcaggtcttcaccaagtttgcccccaagatgatcctacccatggtcagtggctggtgtcggcttgcttgttcagaggcaggtcttcagaacgcagaggcatagttttctgagaacgcatgaatagccactcgggagtcttttcttcaaggagaaaaggggtcttttggttgggccgtcttacaatggggccccggtactgggatatttaggccttttgaagttacacagcaatgcatgagggggaaactattcattattcttttgactgtctggcaaaatgtctgaaagaagcaacttaaaaacagaaagatttatcatcccgtagttttagggcatttcagcctatcgagggagacatggaagcaggggtagctccgtccgtggtgtgaatgaggtggctggtcacacatggtggcttgtgtggaactagagagcattagctccgagtcagggctggacatcacctccccccccccatttctgtcaggcaggctccaccctctgaaagccccatccataaccttcccaaactccaccacctagcagctaagtgttcaaacacaagggtgcgtgcgtgtgtgtgtgtgtgtgtgtgtgtgtgtgtgtgtgtgtgtgtgtgtttatttgtgtgtgtgtctgtgtatgtgtgtatctgtgtgtggacatttcacatcagaccatatcagacactactgaggccaaggtcattctgcccctttggtcacataatggacgttagtcgagcatccattttctcatcaacaactgtagaacctagaccaatggactgtgtacatgaattagttagctgggaggctggaacaaagtactgtagacccgacatttataaacaatgaacacgtactggtcacagtcctggaagctgagaaatccaaaaggaaggctcccacagacagcgtctggtaaggtggctgctgtctgcttcaaagatcgcactgcttcactgtgacctccggtggcgggagggcgagggagtgtacctgagtttgttgggagcagagctcttgtgcctcatgcctactagatcatactggtaattggctgttacatatagcctttcttctttccttttttgaggacgctggagttttcactacagttacatgtagtgaaaaagaggatcaaataatgggaagttatttagcacacagtgtgacttgcaataaatattcatcaagtgctatatactgttgtcccctgtgcaagtgtgtgttgaatggctattgtcacctctttctcagatccacattcctgcccactcctctgcacagaagccaccatttcctcttcatagtcaccgagtaaagagagtctcttggatatgacttttcaggctctttctaaccaacccttatggaactttcgggaacaattctatcactgtctctatcctaagctttatcaatgatgaatagagctgtgctcctgttattgattatgctgtgcatgtacgtgtgtttatttgtgtatgtgcttatagggtgtgtgtgtgtgtgtgtgtgtgtgtgtgtgtgtgtgtgtgtgtatgtatgtatgtatgtatgtatatatgtaggtattgtatatgtgtaccctatgctggcttcttgtcgtagtctcctgagtgttgagattataagcatttattaccacacctgacaggttttgtgtttttttttttttttgtctttctttttttaaacccagatgtcttttctccccttttaacgactggaacacccactcctgtctttatgctgaatgatccccacccccaaccctggtattcctttcaaatccagctctcatgttaaccttatttatttatggaattttgtaactgattggcaactcttatacaatcagttcctcctctgttagaggtagtagagagtttgtcttcccccaagcacctggcccctgttatacttgaacttgctacagggtatcaaagtgaatgcaagccacacggctgtcctttagcatgtgtttctctgatctgtatctccactcatcttactggctgtcacagagtaaatactcagctctcaataggttcttaattcttagcagtaggctcatgataaatattagaggaagaggagaaagacaaaagggtaaattgctttagcaggatatattagattatgtatcccttataaatgatcttcattaagcaagctcccatatctcagtaagttaccacagaaccccatgtcccaactacacatcacataaagctgtggctttactctgtgcagctgtcaatctagtactcagacccgccatgggagatggagaatctgtgataggcaggtgctggatctccagacctctcgtctggaaatgacaacggtctattcagtggtctaaaacgagtcacatagccactgctaagctcggagtgttaggtcatattcttctcatcaggaaggctgtcagaacccacgaggcctgagcttctacttcctcaacaaggagtctttctccatggactaccctaaatcaaaaggtcaaacatgttgttagtacgtcttagatgggtataaacccttataattacaatgccttgagaaacaatgaacaataccacaaacttaaagattatagatgagtggccccagtctaaccacccagggaattttgcagggcagttttcaggaaatacatccatttaaggaggagcatccctagccactgggtttctggatactgctgttcttcactgtgaggcagactctgtgctgctgatgctggtgatgaaaaccaaagcatttccaaccatgacggccccttggtggcctgtacgcaggacttctctgtatcccacaagcagccagtagaccatggagacacttgatggacggcttactcccttgtaatttctgggcctgtaactgtttggagctgtcagggccagacagcatgactactataccatcatggctgtgaaaaatgtnnnnnnnnnnnnnnnnnnnnacttgttccagtcagtcactagatggaataaatcatgggggtagggagggggacagagaatccgggtggcaagacagatcttgtgatttggagatgctatgcaaaggttgagacactgcggtcactgaggagattctgacagaatcatgtcttttcaatccttcccaggcgggacctgaagaggtgtgtgtgtgtgtgtgtgtgtgtgtgtgtgtgtgtgtgagagagagagagagagagagagagaaagagatatgactgagaagtctgatccaatattcccatatgtgcaggccagttttatgttagactttgacataagctaaagttatctgagggggcggcaattaagaaaatatctctataagatcaggctgttagcaaacctatagggcatttccttaatcagtgatttatgtgggaggacccagcccattgtgggtgacactactcctgggctggtggtcctgggttctataagaaagcagactgagaaatccatgaggagtaagccagtaagcagccctcctgcatgggctctgcatcagctcctgcctccaggttccttccctgtttgagttcctctcctgacttcctttgttgataaacagtgatgtggaagtctagttagtccctttcctccacaagttgctttttggctgtggtgtagccctgactgggattccatgacatcctgacctatgccatcccagtcttatggcttccagacccatgttgtctggagcatctctccttccatcctctgcctctttcttgttctgtcttgctcatggtgttagctttgtctctcagcccatttctcatcctgctcccacattaagcacttgctactccttaggcactgggatcagatctgagtcactctgacattagtctctccgatctatcctgggctgcaggctgtaggatgctcaggacaaaggaaggaaatcatgttgtctctctgggtactgtagttctgctcattggtgctcttggggaagacttgtgaccccagatggtctcctctgaaatagggccctgaagactaattctaatatgctaatgtcatactaaaattgggtcactgctgtagcattcaattctttcttgaaaaattagggtaacttggggtaaatatcatgcaagacattgggggtttctagaaccaagttgaatgaaagggatacttttatctatgacatttcagggaagttggaggcagggaaggaaccttgttcattaacaaggaaatgttgctgtgaaccaatttcaaagggcaaagcaagaccaaaggtaaactcttagaagggatgctcctgtcttacaaagtaggaggggcctagtgtcaaccatggattggagatagcagctcataactcagaatagaattaaggctaatgtaaattgtcaacaaaagtatgtcacatatccctctacaagggaacaaggtttcaggatctctgttaggattttattgctatgaggagacaccttgaccatggcagctcttaaaaaggaaaacattttggggctggtttacagtttaggggctcagtccattatcatcacagcaggaaacatggtggcatgcagagagacagggtgctgaggaggtacctgagagttctacatctggatctacaggctgcagtcagggaaagtcactttagcctggttggaacatcggagtcctcaaggtctgcccccagaggcacatttcctccaacaaggccataccttcttcaacaaggccacacctcctatgggcctatagggaccattttcttccaaaccaccacagtgtcccagggtgcacagggcaggctactatcactgaccagatgagggagggcactagtgagaagaaacagaaaaaaacaaaacaaaacaaaacaacaacaaaaagacaactttttatttatgaaactgctctatttcaaagcatttttgttgatatttttaagttataaaataccttttttttaaaattaagaatcaaactcacttgaggagagaggtggttattctgtgagtccccagccaactggacagtgtacgcctacattgagggtcatcttctcctctaagtcctcttgttcaaacacccatctactctagaaactccctcaatcatatacctgaggcagccagatattctacctgatgccaagccacctgggttttgttttcagaggaaaagacagacccagtcctattgagcccccataataattctttgactgcctcccttcctccctctctctctccctgctttcttctcttccccctttctttcccatcctccctccctccattctccctctctctcttcctccctccctctctccctccttccttccctcccccctccctccctcctttcctttctgacaaggtttcatgtagcccaggctggctttgcccttgctgtgtagctaaggatggcctttggctcccagtcctcctgtctgcatgccctgggtactgagactataaatcctggccataatctaagtttctaacaaacacctttgatacagcccacttcattttttttaattgacagtgttgtattctgttacctttgttcagtgatgtttgatcaggactagctgtagcatagtgagaatacgtctagtgtatctatctctcttagcaatgtcattttgaataactccatgcctctgtttttttttttttttttttgtatttctgcagagcacattcctaataagagactcaatgtttcaagaagattgtgcatttagaattgtaataaatatcagcatatttctctgttgagggataaagccacttccattctaatttttaagttcttgtgctcttggaagaaaacaatgggtatatttacctttgccagcctatatcttggaaatatgctaagttttttaatgtaaaattatgaggtttgttctcacagttattgttaatttgttttgaatagaaacatttctgtaattttcttcaagtcctttgtctatattttctcttggcttgctttagtttttgttgatttatagatactctttacattttaaggatactcattcatgttttgtcatacaaattgcccattttagccatttgtcttttagaattattgatgacatatttagtaatacaagaattccattttgttttgtgaaatcaacttttccctgcatgaattttgtgccatattctgaatggttccccatcattttcctttgcactctgttagaggtgttattttttcttttcacatttaattactcaatctgtttgtagctggttctgagtgtggtgtaacttatgggccttacttagacctgaatcatttcaccactgtaaatgttttcttctgaagaaggatgaacgtggagcccctgacttgtctttatctcgtacttcccagggtatgtgagaattatttcactctttacatttgtaaaatagtagaaggaaagaacttgggcagcttctttagatccatttgtgtcttacatgttccataggtggatcaggctatgagctcttgggcagatctgccaactctcctgttccttcattaggaaggatgtatgtatagaggccagaagttgttattggcattttcctctattgatcttcatctactgagacagggtatctcattgaatccagaacttgccactttggccagtaagtccctaggatctgtccatctcggttcccagtgctggctttacagattcttgctgccccacatgactctcttacgttggttctgggaacctgaacccacatcctcatccttaatcagcaggcactttacccacggagccatctttcaaccctcttttgtttttggagcatttttgtgtgtacattttgtcaacctttctgattttggtctagtcttcaggcgtgttctcctaatcatgtgtctccacagaaatgtgctggcagctgtgacatgtgagttgcatatctagaggggtctggtgcaatatagtcccacttattggtgagaaagcctagcactgggaagggataccacttgccagaggtgcttacctgtggcagagcctggagtctggcccaggaactctgactgtacagtttacactcacttctttaaggttgggggttggctagaccatagcccgtggcatagagacaagccagagtgcttactgagtgtatctgctcacaccccaagtgctcccattcaggtccttctgatttgggtctttttcttgttatagacatgtaccacaggaaattgagtattcattatcgtcaccccaaggaccaacagaaagaatagacataggacatctgaacacccatgttctatcaactgtatctccagctgtgaaaagtgaggcactgtgagctgcgtaccttgcagcccctgaggcagagctgaggtgtgaccttggctctgtctgattttgaatctttttgttcctctgtctgctaagaagcaagtactctgggttttagtggacacattgacaaacgtgtctcatagggtaccaagttcctttgtgacggcgtcagagcaggccagccagaggaaaggcctgcaggcttcagaagaggattctgtggtcacagtggcgattgtaagggattcaatgaaacatgcataccatgagagtctacgattaaaatatacgaatgggtcctttccctttaaagtattgcatgccctctgatttataggaaaatgcttcaaaatgcttatctggaccccccaatcccacattccttataccatttgacatgcaaagtgtcatattcaaaagcaaattagtctgaaatgaatcctcttttaccctttttaaaaaaattttttcaaaatccagatttagaatttaggctcattaatatgcacaaacactactcgattaagccagttttaatttctctgtgtgctttgtaaacagggattacaaagatgtttgaattttcatggcagattttggagtagtgtatacatttgggccattatcacataataaataaataaccccctcgaatcagggagttggtgatgtcatcctcggaatgttgatttttcctctcctcatctggtcctatgaatatgtgtctttggtctcagaaagcacttttctgaatctggctgcaatacagcctcctgtccctgggtcctcacttggtgcgcttgcatcctccagccttagctcgtggggattgaagcctccacttggctttgtgaaactggacttggaaaaacaccccgtttattaaatctcgcactaaacgctgacagttgtaggcattagttcttcctggtgtctgccaagtgagctggaagagtaggcttatcttgttatatgcagatcgcacagtgacagattctcagagcttgattccagccatcagagcgaatggccaagactcatgtcagagaagtgccctggggaagcacggccctccaggggagctcagtttccaaacatggagacaagatgcacttttcccatgatgcaccctggcactggctttttaattgttatctatgcatggggattcttgagagaaacaagtgtgtcaagttggtaggagagaaaaatgatacatggggtgctaaaaaataagttcggcattcgccttctttaatctccacaacaaccccttgagatgctgtgccattttcttgcctgtgccatcgataagaacaagaaccattggggacttaccaaaggttgcaaggccacagagagctccaacctagttttgtctgccctgatttcatcttcccatcttctctcttgctcttgcattcccaatatttgttgagtgactgactgactgaaccccaagtgaaatcagttgactcccctccctttcttatgacacctgtgcggccatgagtttttggtgtctgggagactccctacaggttgtacaggtagcacaaaattctctaactaggtgcccccttcccagatttgtcccctccaccctgcttttgccttagttcttctattttctcttcttgcttatttattttttactcccccaaaggcagactccaagtttgatctgtcccactgtttgagctatctcttgggtctagcacagcctctgggcacgttgaaggtggtaagttttgttttcttggacttgctcattagcaggttgctcacggtgagtcacacaagtccattccaccagagatcatttcaaagggctcttcactttgaggtaaaaaatgcagccccaatacatcatgatgttaggtgtccccactaggctagggtgcatcctcttgaccaggtcccacctcagggtgtgtgtgtgtgtgtgggggggtatcatctctgagtggggaaaggtggagatttcaggggtcaaggatgattgtaccttgtgtccagatcatctgtagcaacacatgccctgggagtgagttaggaaagaatgaagaagtcttctttggatggcaatagtggaagaaagactaacactgcctgatgcagcctcatgggacgactcctcagaaggtgactcatggaaggcagtgctctgggatgaggaaagtgggggcagggaggggcagaaagtgaagcaagaatgtggcctcggctggagacagtgacctccagcttgcccctgaaatccctggtgtatgaattccagaacagagctgctgcttcctaaaagtgagaagccgtttgccctcagagtcactgaaccattagctcttagatatctccatggagaagggtttgtgggagcttccaagtggttgatgctttgggttggctgagggcagttctctggttcttgtggccactctgagccccagcacccagagctgaggtggaacacaacagaccagtacagggatcaggcaagtcctccctaacatcacatctacctctatggttttggataagtttgctgagtagtgcctccccttcatcccacccctcatctcttcttctcttcctcctccccctcttcttcctcctctgcctcctcctttcctcctcctcctctttttcctctttgacaaaatgtatataataatattgacactttacctttcaaattttatttatttttattttatatgtgtggaagttttgcttgtgtgtatgtctgtctacatgtgtgcagtgccacacgtggaggccagaaaagaagacatgccagctctaagaactggagttagagggagttgtgaaccaccatgttgagtgctagaattcaagttcagattctcctcaagagcagccagagctcttgagtgctgagctgtctccccagcacctactcatttttaagtgttcaataggtggcataagggacactctcattgttgtgaatccatctgcaacacctatttactgaccatttttctcgtcttaaaactaaatctctccaccaaatgaaaattctaattcctggttccttctgcaccaactaccattctccatcaatttgatgttctagctacatcatcaaaatggaactttctgctacttgtccttttgtaattgcttccttctctttttaatgtcttcaggatatatcctattgtagactacatgaaatttcccttctttgtgtgtttcactttgcttactgaaccatccgtggacatttggattgcttccaacttgggctattatgaataacactatccacagggatatacaaatacccatagttgtctcttgtttcatgctgaggtgcacagaagtcttggggtttcaatatggaagattctgggtcatttgagcatccttattgaaagcactaacttcactttgttatcactgtctaacgcggtggcttcagcagaggtgggaggggctttgcatttcatgaaggaagactgctggttgggggaaatcatcatctttgggaagtatttatagaaattgagttgaatttaaattttttttcatttaaaatacataaagggaagaaatttatggtctttgaggttgcaaaagcgctgtctaccctctgcttcagcgggctcattgcttagggcactttctaggtgactatgctttcctatccagtcaatgtcactctctgtagcctgcccgatgcttagtagtgtgaccgagactgtcgttgagttggccagctgattctgaataaatgaattggtaagtcaatgaatgagtacagggggagacagaggccatataccttgagcttgagccagtgtaatacagcttactgatttgccttcaagaataagtaaaggacatttccctaaggaagggagccatgcttcctcagtttctcagtactggggagaaggcacctcaaggtgtcaggacagcaaatttgtttcttgtctctctgccttgatacacaaggacaacagaaacgcaattcttactttctctccctggggacttttgaagctgcttcgaatggaatattccgagctctttaatctcttaggaagaaaggagttttatgaggataatcacacactgtccttgggacatcagcacctgcacggtacccatggctagtgggggcattggttttgaagagtgctttttgctgttgtccttttttatttaccaggcaagtgttgcatttgtgcagatctgtattcctagctggaacaaggtatttataaacaaagttctctaacaccatcatgactggggtgatagtgatggtggttcatagtcagagcagcagccaaaatgcattcctattactaaatttcagattctatgctcagtgctttcccccaccccacccccagctctcatgacaccataaggctggtgttatcaaagagtcaactgtaaagacgggacactgaggtccagagaggtcacatgattgcagctacatcatttagtggataaaaagcagagctttacagaaatgattgccttgtggtacctgaggataatattctccctaataaaagtgtaagttgagttctaatcaactatcagaaaaaggggtgggtttccagtggatcgtatttaagagggagctttagtgaagggaagcattggttgaccttgaagggttagaggactgtggattgatggggagatggtaagctgtgagtggcagtatcctttcaagattcatatgtaactgggtagagtgaagggcaaatagtgggtaacaaaggacagcatgtgcagaaagagagggtgggactaaataatggagaatgtaagtgctacttttctgccaccaccgatggccaaagggcacatttggaaaatggtgactggaattaggagctaagcccatagacagaaagtatgacagtgactcttcttaaaggagaagaccccgatgcttccctctagttctctgttatcaaaggaacaaatgaagaaacccatcagtcaccatttggtaataacagatgacagaatgtgaattcctgactttggaatgtgcatccccagagccctggatcggctcagatatgattgaagactctatcagaggaatgagagaggatcatggcttcctgtaggcagatagagggtttggctgtccactaaaggtctgattgatggatgggacagagggattaccaaggaacaatctaggtagtgtgtacaaggagcctgaagtcaaattatcagcatagtagttttcttcaggaagttctttggaatgttcttttttgtgcctccacctttgcccatggtgcttgatggagatctttcttgatactcgtctcatagatacatttctccaattttcttcttcaccatgcatctctggctattccttgagggtctgtggatttgtgtaaggtccacctcaatctagtctgaccttattttcactaaaataacaacacgtgcaaaattctttccaaataatacagcattctaagattctaggtggtgaattgttttcattctgggatgctcgctgacttagtccacactatataagcaagagccagaggaagacgtgtgggtacaaggtcttagagatggtttggatgatttgctcagcagagagaactcagctgggtgagtgtgaacacggggctcttgctcaagagcctgctggagacctaaccatctgggatctgaatgatgtatctgagttttaccccctgaggaatctggagtctgtggcagagagtgactgacaatgggggctaagacaatggggggaggggtaagggggagtagtgatagcctaggtcagttggaaagagctcatgacttaggtgactatggtctgagttagggtggaacagttgttctggggaagagaaggggacattttaaaaatttgtatttgcttttattttatgtgtatgaatgtttggcctgcatgcatgtatgtgtatgtgccctgtgtacatgtctgatgtccacagaagtcaggagacactgttggatcccatggaagtagagctatggacagttgtgagctgccctgtgggtgctgggaaccaaacctgggccctttgccagagcagcaaatgcttttaaccacttatctcatcaggccggatggatgtattttaagagaaagacagtagcagacctggtgagagatgggttgtggcaataagggagaatgaacttttgaacttgggtgaatctaatgctgaaaggggaagagaaacatttatggagaacaacagttcttcctcggacaggatgagctggggctgtttctgggaaggcaaactgtagacatccatcagcctgctggaaactcactgctgcagcttgctggctccttcgggtgctgttgcaggaaatctgaagcaatggatactgaagtgtgagtagtccctgcttttttgagggggtcagattctcaagagtttgtgtaaatgtcgccatagtctagattccttgtggttgtcatgtgtcataccagaagccaacatagcagaaggatctttctggaacacaaacctgaggatatctcagggtacactgtcctatgatgtgccctcagggagtggtcttcactgatctcatggtagaatgctgctcaattgagcttcctgacaaggttgctcaaaacccagaacatgtcttagattatactcacttcaacttctctgatccttctacagtatgaagaacatgcctgcatgcctgaacatgcaccccccccccacacacacatgtgcacatgcatgcatgtactcatacatgtgtacctacacacacacacacatgagtgcagactcacaatctaccccctcaatgtgaagaatgggcccaatgtcccctctcatgtttataatttgtacctgacacttctctttcctggaatcatatttataatttgtacctgacacttctctttcctggaatctcttctttgcttccatttccctagtctttcaacttcccagttcaacaccaaatgatctgtaacactccaagtaaaatgtgtttattgagaagccatttccccaaacctgtttcctctccaagaactggggcatccatataccactatcttctcctagaaagctggccatgtgataggtataaaggagccatccacttcccaagactgcatgggaaggagatgaagaaagagaaatggatggctgggtggtgctatgtacaccgtgagaattcagctgcaagaccacacttccagcaggagaggtgtcacaatgcctgctcacccttcctcaacttctctgatctctcaacaacaaaccaacttaggcttctaccagagtttgtcccagggaaccaatgagttttggtcttacttccagagcatgaggggccctaaaatagctgtactgtctgaggccagcatgaatgacgaatggacggcaggttcccagtggctgcatagatggagactccttcagttaaccttccccagttgagggattctctgcaggtgtcaacacagccagtgatccacaaagaggggagacttgaacagacatctttttactccaggtaggcatcagtgacagaccagagcagagattccactcaaatctgtcctggtgaatctactagtgattcggaagcagggatgactgagagagccctacctcttaccacagaaaggcgcaactgaagctggttggtttaatcaccagcaatcatttactgctttaaaagcttggaaaagggacttgtgaatcttgacactcgtatgaacattttaatcctttcaggattcaggaggctcattgtcttatgagctgccctccgggagagaccatttgaacacaggaaataatattgccatgaccattgaggaaagagaaacaaactggactgtaatttggccaagacctcagagctccacagcatagatgacagctcaggtaacagctctcatgctaagtacatctttgagctgaggcaaccaagggtttgaaacggggtcacagtctgacttctcctatatttgagataggaagtgtggtcatggttgggagcctgataggtgatatgcccatgataacaagcactgtggtaacacttatgggagatgatctctgggtagtggggtttggttttaagaggtccccgaagtctatagaattctgtctagacattttccaaacaggggtccaatcaggcagttctgtggtattcagttggataagcaaacgtcttaacgagaaatattagtgtttctagatctttatctcgatcataacatttgctacagtggctttaatttacatatcaaagtcactgaaagtaaaatgataaataacgcatgaaggcaaaaatggctaaagatagtaaaataataaaatgtgatgctgcttgcatttaaatgcagaagtcaggatttctttccagagaaccattgaaatcaaatatgtgtttctaaggtaaaaaatcagaatcaacaaaattctgtactttctgtgatcttacagttcccttgaaagccttcaccttgccaaaggaaagaatagaactgtgtagctaacagacagctttcctatcttctctgctgggtacttagtttttaattaagtgttgacgatcttgcagatctactctaaccccttgattggcttggccatctctggagttttcatccatgttctctccctctctttcttgactcctctttcccccatttttgatttcagattgcttcgattgtcctggtaagatttacccggagtccaattcacactggttttgctggtagtcttgaattagaatgagatactattctggtgaccccttggtagcttcatacttcccgtggtctagcgatttctccgtagaatccaaatgacaccaccagcccctgcttcacagcttttctcgggagataagtttaaatcagcttatcatatccgcttatgcaccgaggcgcgagacatctcagcaagcctgcgtttctgcttcggggccccacgggctactgcagatcagtgacctacaggaaccacatgacttcagttccctttgagagaagtgacaacaggtgacttcacgcaccagattttgcattcgtgaagagagacaaagatttaataaatgctttccgtagcatttcatagtatagcctgctgaagtggcccaatggggcttgatggtgcggtcacattcaaggggaagttgaatgggagacacagaagcaaaggggtagagagggaagcgcacagggctgggcggaggacagtggtcctggagagtgtgaggcgaagcacccctattgatgattttaccttaggttttgggaatcagaataaattatcatatgctattactatgcaggatgaaatgatctcattttgactagagcaatcttccttgattaggttcagccactctgcttcatttccagatgtattgggaaataaaagttttctttctcctgagacataaaagcttatgctctcgggaaacagtaatctgatttttccttaatttaaaaaaatggtatgtattctgtatttccattttataactgtatcttttttatcaatgtcaaaattagaaaaaatatgttattggaaaacgtagggaatatgtaggaaaaaaatcatgactcctatccttagagtatttctattttgcatatggaattaaaatgtcattttaataaattggggtctaagtatgcattaagtttctacccctcttttaaaaattgaccacgttatcatatacatttttatttgacgattccattctcgttattaacttgtttaaatgtctccctctgattgtgtataaaggtcatttgtcacttttgctattggaagaatgttataatgctaagtttaggaaatgaatctctgcatttttctgtgattaattttgtaggtcagagtcccatagatagactaagaatatttctttaattatgttttatggttcctattgcacatataaaaatgactatgaatatttctttaatgatgttttatggttcctcttgcactggttcacacttttatccatttgtaggttttttgttattgttgttgttttgttttttgcttttttgtattgagcaacatttatatgtactaggcagggctggatcagagttagatttgagcaagccctgcagaggaggatacagagagtgggcatgtaaacaaatgattccaattggaatgtcagcccaacctttcattgctgaactgtttgctgtgtatagattcagggactgagtaagtcactgctttcagttgtgtacccaccaaggaggccaccaagctccagggcacacttccaaggtggtgatgacacaggtggtactgcttgtactaatggggtcacaaaacaaaagtcatgagccttggaaaaaggggtggtggtggtagggaggggaaggcgataagagagagtgttggagagagtaatcgatatattttatacaataacagtaatttttaaaatggggagtggaggtgggggatgggaagggtatagcctgttcctttccttattgtaacgagtcctgcagaagataagtgacagtcagtaatatctaccagggccagttagtggagcctcactgagggagagattgtgaagctgagattttaaggatgaaaggcttgctctatatgaaatgaggaaaagaacattccaaagagagaagagcagcaaggggagtgcagaggcactgggggcggggcagagcttggattgttctaggaactgtgggtgtgtagggaaaaagagtgaagcaggaactgtgcatcgccatgcacgactgtgtgagaggtgtgtgtgcatgtgtgagcatgtgtgcacatgtactgtgactgtgtacatgtgtgtgtgtgcctgcatgcattcgtgtatgtgtgtttgtgtgtgtgtgtgtgtgtgtgtgtgtgtgtgtgtggtgtgctcatctacatgtagaggctaaagattaaccttgggggtggttcctcaggaatcctctacttgttttctgagacaaggtctcttgtttggtccataagtaaactagtttggctggtcatggagccactgggatccaactgtctctcatttcctagcactgggattatagggtcatgatgccatgcctggcttttggagtagattctggggactgaactcaggtcctgttgcttgcatggctgagactttacggataggcacatctgcagcttagggggctgggcatgttttaggttagtgcaataagaatccaatggagaaccaggatttaaatctcatgcttaagaaggttagcccagtgggggtgttagatatggagatataattattaggaggcttataagcatcaaagtctctatgaacagccaccatgtgcttgggtgttggctaaagaccattgacatcagctgccacttgggcagcactgatgcttagttgtagaaagccttgagggatatttatatccctaaatatgtaatatatatatatatatacatatatatatatattatatatatgcacatatatatatacatacatagacacacacacacacacacacatatatatattacatggaagttatttcgtttatcattatttaaaatatattagccatgtattacatttaaaatattctagccttagatctgaaggaatttgaactaaatagaccagagtagcattttattctatcgagatgataagagcaatatgtatataatacacaaacaagtaataagcaatcaagatgtgtttcttggcatggttatacccaaacttatattgactgacctttacgttgtcttcactattctaagtaatataggaaggaagctccagctatctaggttttgtggatctattctgatagaaaggatggctttccaagaattggttaccaaaccaaactcagcatagtggtgtaccaaatgaaacactcaccacgaatgtacacaggctacccactgtctttgttaacccaggctattatcctgctctagatcttggtctagccactacttgaatatgtgttcattggcatctctttgtttacttgggcattacatgtctctattggttaagaattcaccttttgtcccctgctgctgctgctgcaatagcaaaatctagaacagtgcctggagattggtgctcattgtccatttgctttttattaaaaacatccactttttactaatcatttctttcaagactgggttagtaccatggattgccagagtgattggcttttctggacatgtattgatagttcattattttttataataaccttctctttgaaacttcaagtatagtttctttggcagtttttcattacatctcattcatgattaacattttcttttgcattgcagattctttaaaaacttatttaaaatatttcagtcattttttatgatttctggcttggaattggatgcttaaaaatcttccttagctaaataaatgtacccatagtttttttgtctcttaataaatttagcaataaactgttgtcacacactcagaatgggctctgcttcctgtctgttcaagattgggattcctatctgttgcaagtgtctgtttgaaattgtgtgtgtgtgtgtgtgtgtgtgcatggctatgggctatggcacagttgaggagggtaagaaagacagccttggatgttggtccttgcctttcatcttggagacaggttctcttgnnnnnnnnnnnnnnnnnnnnnnnnnnnnnnnnnnnnnnnnnnnnnnnnnnnnnnnnnnnnnnnnnnnnnnnnnnnnnnnnnnnnnnnnnnnnnnnnnnnnnnnnnnnnnnnnnnnnnnnnnnnccccccaatgtgggagcctgctctggtactagaggtgtgtgctaacagctttgtatgtgtgctgggaatctgaacccaggaccgtattgctagccatctttccagccctcattttgggattttgaatctattataagtaaaatactttattgtagtttcttaaagggattttgtagttttcaaattttctctggatctaaaagggtttgcctgaggattttttgaaaatgaagttgatgattgagtagggccaggaggtttgggttggaaagctagtcacactctgtgtgtgtgtgtgtgtgtgtgtgtgtgtgtgtatactgacaagttctctaacatcaaacttccactccagtcctaagtgttagccttcccagtgagccatcagctcgggcttcattgctggcatatagggagcgcctgttttgagaggtgtgggtgtgcatgatgcactgtgcaaacagtcttatacgagttctcagatgattgacagatgcggtactttctagtgactgtatccttgcatatttttcctgtatctcatccccatgtttgcctgtgtctttgtttttctctttgattagattaattcatggcttatctcctttattgtcttttcctcaaagaaccagcctttagatttatttattaattctgatgtttccatgctcattaatgagctgatttcctctttgatttttattttgccctccattctgcctcattctcctctacattttcttctaagtttacatactcatttcttgactttatttagttcttgctcggtgactcaaacatttaaggctctgaaatttcggttgggtgtgtgttggccaatcttcatgtatttgatgggtgttgctctcagtagtgcagttctctaaaattctgtaattgctattttggttttattttattttatttttttgactggagaactatttccaagctgctggaataattattttgttctacttttgaaattaatttctagtttcttatagtgtgagaggaggctgtaatctatattattaatttcctttttttggaaatttaatgggcttttcttggtggttgcatattggctgattatataactgtttagtgggcatttgtaacggcactcatgtatttatttgcagcatgtaaagcatggataaagctttcacatcgttttttaataatattaatcacattcgctaattcttcttataatagtgaacagtctttgctattatttctttcattcccatatcttgaatttacaatagattcaatcatgccctctctattctttgctttcttcagatagattatacccaggcttgacccaactctgttctcctgcctctacttcccaagcgctggaatcgcagatagaaactatcacacttagtttgcaacagtttcttctttataataatgatgctgtataactctgactatgaatattttgatatttatacatttctccttgattttgccatttgtcaatttgaaagagacctccttaaaaatacaacttactgtacttgtgtttatagaatcccatttattaacccagagactcatttctgccttcatattatgtgataattttctgctttgggttttgtctttatctctctttcatctttgggtgtgctcatgtttgggtgtggagagagatgcacatgccctcaggtgagcacgctcacgggagccagaggctggtgttgtatgtcttccttagtgactctccatcttaatttttgggagaacatctttcagggaacctggagctcaccaattcagctaatttggctggccagcaagccctagggatcccttggtttctacatcttaaccctaggattacagatgcacactgccgaaaacagctggtgagctggtgtgtgtgcgtgcttgcgtgcgtgcgtgcgtgtgcgtgcgtgcttgcgtgcgtgcgtgcgtgtgcgtgcgtgcgtgcgtgcgtgcgtgcgtgcgtgcgtgtgtgtgtgtgtgtgtgtgtgtgtgtgcgcgtgcttgcgtgcgtgcgtgcgtgcgtgtgtgtgtgtgtgtgcgtgcgcgcgcgcgtgtacatggtttacaggggtttgaacttggctctcatgctgcagtgagcactttgctgatggagccaccttgtcagccttgttttacatcttggagttggagttcagatcctcttcttggtaaacattatgcatgtttttttttcattagcctggagttcattttgaaatttttttcctgttgagtttatagtatctatatgtgatgattaatctacatttggctggattcggaagactcagtgagggtgtaaccagggaagtgtaactgagttagaagatccactatgagtacaaatggtaccagcaatgggctgggctcctggatgcaataaaaaagggagaaaaatgatgattttggctatcttcctctatctctttccactttactatttttgaaccaggctctcccatccaacttgtatctcattctttcccaggctggttgggtagtgaagcactaggatcctcctgtctccaccctgtagcagtggagtgatggatatgcacatccgttcctggcttattatggaggtgctgggatctgagtttagttcctcacagatgctgtgtaacttgtacagtgagctctccatcactgagccgtggagccttactgagagtgtcctatgtaagtctatcaacaaccatccttcattgaagaccgtggacatttcctcttgagatatcactgactgtagtttgtacaattctctattttttaattcgtttttggaggacaggctatacactgcaaatttctgattgattgattgattgactgataaattgatttttacctctaacattactgaggtttttatccagctaccaaacacttccaaattcctttagaattccaggcttgctttccttctctattgttagctttggtcctcatgcattctgcaaagactcatttctttctctcgctttcttcattctgttattccattttctcatcatactttagatttttatttaatgttttctgactttcttgtttctttgagagttcagatgactgctgtcacacacatcccttcctgattttctggagttcgtcttcatgaaacctacaatatcagaaatgcaaacctacaatctatttttaaacatcatggtttttgtttttgttgtttgttttttcttttagttgttttttttgtttttgttccagagatgtcatatgagcataattttgcattttcagcttgtttttttttaaattgcctttttaactcattgtaaaatggaacttcatatttcagatctgttacgtattgtaagctcctgtggttgattttcctttgatacacagctttctttcttggtgccatcaaatctcctataaaaccagagatgagggccagctttgaggtttgccttcagttttgagttttctattcctttgagaggctagggaagaagaaagagttggctcattgccacaaaaatgttctgttttagtaggctctacaatattttctgttccctctccctctccctctccctctctctgtatgtgtgtgtcttctctctgtctctctttgtttctctctgtctctgtctctctctcttctctgcaatgatttcatcctgtcttaaaaaccagtgatgtgagcatgtaccatgtctcaggatgagatgaagtatccaaattgtatcccatccacactgtcttaaaaacccaccatatgggtaagtaatcctcttttatacaaaataaagcaaagcccactgagacatgcatggcttctattagggatgccaggagcatccttagtcccttcctgactccgatttgctgttgttttcggaataactagttccatcacaaaagtaaaagattctgattgtaaaaaatctctgaaagtgagtttaaaatacccagagatggaagcaaaaagcacatgatcatctcaccacatagaaataacagctgtttaccttcagacactggtgtatgtgtctctgtgtgtgtgtgtatgtgtatattaatatgacgtggtttggaaattttatttgcttttgtttagcaacataccttagcaaatttcccatgtccaaatcttattattttcatcatcagttttaatacttttcttcccctgtgcttacctatgtttctcagttacatgcaaagaaatattatttataataactgaacaaaaggccaagctaggggacaaacaggacgcatcaaactatacacttaaaataaatggagcatttggtaatcatagggaattgtgaggaagtagtgggtggtcctagcaggcacatgtatacccttacatggacacatgtgtgtctgtctctgacagcagcagacaggatagagcaggtctcaagaatctatgcttatctgagtggtggtggcacatgccttaaaggcacatcccagcactgagaaggcagaggcaagcaaatctctgtgagttggaggccagcctggtctacagagcaagttccaggacagccaggactatacagaagaaaacctgtcttacaaaacaaacaaacaaagtctctcatttccatccccagtgtgtgatgggatggggccattgattaccactctagactttcatatctcaactataaagcaggaggtgtcacatctttccctccatgtcttccagaggaacttgatttctaaaatgctagtgcaattgtttaccttatgacaaacgtcatgtaccacctagggataatgagggatagtgagggtgatgaaagtccattctactaagtttataagcaccgaccctgcagaagccaggatggacaaaccactgcaggaaccctgccctctgcaggatccctgccccctgcaggaaccccaccttctacaggaaccccaccctctgcaggaacataaccctctgcagaagagacttgttaggcaagtttctttcttttttttttttttttttatcaatgatcttctgggtgacagtgcatgcctcctctcatcactctgatatgattaattcattcatcatgttagactgatttaattatttatcatgtcgttttgtttatttaatttgcatatcaatggccagggcacagcatagctctgcttcctgcagaatcatattaagaaacctgatgcaggttccaggtgtgggggttgggggcactttctctgtaattgaatacttaggtgcttccatacaacagctaaaattttttttttctaacttggtggccatccagctcattcttgatcattctagggagacagtgagctgtaaattatgtgttttcatctatgctctggtcagtgttggcacattttaccttcccatagagagggaagctgtttccttaaggcacagctatctcaaactcttagtccttgatttcaaggagaaacaacaccagtctcattgtctgactccttgtctctggattccccattttaaatacaccgaccctagtaagatgggggggctccaaagagacattgttcatgtttccgtctctagatcccagtttggagcagtaggaggaaggaaatacttttttccccctaattggccatcagcatctatgaagtggactgaatgaagacctaggagtgagcctgaacaagacggttattcatgtaacttttgtgaaccactgagagtaactcacaccttccagacatttttattatcattttgtggtctccctctgtgtgcctgctatggtcactactgctgtataacaggccacctagacatttggtagatcaagatattagctgttggtgttgtgtcttttgggttgtatttggtagaaagcttgcctctgctctgcagtatctcctgggacagctggggagtaaggaatgcctttctaatctgtctaccaagtaaacactgtagctcagctgagctgagggatgaaagatattagtgtttttttttccccctcttgggctgcccaagcttcttcacagcacggagtcattttgggaatgtgttatctggcttttgtagccttgctttggaagttatacaccacacccattctgtatgtgtgtgttcagtctcaaccagggttaaggggaggtaaataagacgtcactatcattgcannnnnnnnnnnnnnnnnnnngtttatagtatctatatgtgatgattaatctacatttggctggattcggaagactcaggattgggattaccagtgagggtgtaaccagggaagtgtaactgagttagaagatccactatgagtacaaatggtaccagcaatgggctgggctcctggatgcaataaaaaggagaaaaatgacgattttggttatcttcctctatctctttccactttactatttttgaaccaggctctcccatccaacttgtatctcattctttcccaggctggttgggtagtgaagcactaggatcctcctgtctccaccctgtagcagtggagtgatggatatgcacatccgttcctggcttattatggaggtgctgagatctgagttcagttcctcacagatgctgtgcaacttgtacagtgagctctccatcactgagccgtgaagccttactgagagtgtcctatgtaagtccatcaacaaccatccttcattgaagaccatggaaatttcctcttgagatatcactgactgtagtttgtacaattctctattttttggaggacaggctatacactgcaaatttctgattgattgattgattgattgattgacggatagattgatttttacctctaacattactgaggtttttatccagctaccaaacacttccaaattcctctagaattccaggcttgctttccttctctattgttagctttggtcctcatgcattctgcaaagactcatttctttctctcgctttcttcattctgttattccactttttcatcatactttagatttttatttaacgttttctgactttcttgtttctttgagagttcagatgactgctgtcacacacatcccttcctgattttctggagttcgtcttcatgaaacctacaatatcagaaatgcaaacctacaatctatttttaaacatcatggtttttgtttttgttgtttgtttgttttttcttttagttgttttttttttttttttgttccagagatgtcatatgagcatcattttgcattttcagcttgttttttttaattgcctttttaactcattgtaaaatggaacttcatatttcagatctgttacttattgtaagctcctgtggttgattttcctttgatacacagcttgctttcttggtgccatcaaatctcctataaaaccagagatgagggccagctttgaggtttgccttcagttttgagttttctattcctttgagaggctagggaagaagaaagagttggctcattgccacaaaaatgttctgttttagtaggctctacaatattttctgttccctctccctctccctctccctctccctctccctctccctctctctgtatgtgtgtgtcttctctctgtctctctttgtttctctctgtctctgtctctctctcttctctgcaatgatttcatcctgtcttaaaaaccagtgatgtgagcatgtaccatgtctcaggatgagatgaagtatccaaattgtatcccatccacactgtcttaaaaacccaccatatgggtaagtaatcctcttttatacaaaataaagcaaagccnnnnnnnnnnnnnnnnnnnnctgttggtgttgtgtcttttgggttgtatttggtagaaagcttgcctctgctctgcagtatctcctgggacagctggggagtaaggaatgcctttctaatctgtctaccaagtaaacactgtagctcagctgagctgagggatgaaagatattagtgtttttttttccccctcttgggctgcccaagcttcttcacagcacggagtcattttgggaatgtgttatctggcttttgtagccttgctttggaagttatacaccacacccattctgtatgtgtgtgttcagtctcaaccagggttaaggggaggtaaataagacgtcactatcattgcacatagtgatggggtggtaccagagtaggggagcagaagagtgtgtgggtagaagatactgctgctgtcatctttggaaaatacagcctgcttcaacttgtcagagcttgaatgccttccccttcttttatagctgaggacatggagacctagggaggatgagtgtcatcactgctgtgaagagacccataaccaaggcaactcttataaaggcaaacatttaattggggctggcctacagtttcagaggttcagtccattatcttcatagcgagaggcatggcatcatgcaggcagaattggtgctagaggagccaagagttctacatcttgatcttaaggcagccaggaggagactgtcttctgcaggcagccaggagaagggtctatgtcacacaggcctgatttgagccctcaagcctatgagaccccaaagctctacctccatgtgacacacttcctctaacaaggctcatctcctctaataaagccacacatcctaatagtgccactccccatgggccaagcatattcaaaccaccacaatgaataatacctctatggttacaagctgaggggagtgcttgagttgaacttggctcctggaattgggctctagagaagacaccatgagccatgagttgccatcacagcaaatgcttatggagctatttattactctatggtattgctgtgtagtatctatttatgaagctattgctgttctgtctactaagagctatgaagctcttacctcgcaaaaactctttaacaaaatttaagatagatatcttttgtgacaccaaaacatataattgtttaagggctttgctcatggtcacataggcaagggtcaacgatgagattcagagttagccccggagacaatgcacacaacaatacactgtttcaggttcttaagtaaccatgtaagttggttgtaatggctactcagggctcccattcttctgcattgaaaccaggaattttttccttatagttatcctcccagtatcccatgttatatgtgtacccttagggataccggagttattaaatcaatatcaagaagagcttagatatgcaaaggaatcccaaccttgtggtccatgaagaagaatggtgttctccttataacactggcctcagtctttatttctctgaagcttccttgttcagctttctccttctttcatctctttttcctaatgaatgaatgtggatgtgggtgtatcacagtccaaggacaacttgcaatctttcttcctatcatgtaggttcctgggattaatctcaagttgtcaggcttggctgtaagtactcttgctcagtgagccacattctggtctatctcattctttatctcaacaggatttaacacaaggcactcactccttttctatacagttgctgtatgctcttagctgtggtgcctgtgtagagaaagtctggctgttttaacctgtaacatatggggacctcattgggctactggaaggacttaaagattgaacatgaagaactgagggtagagcttagtgatgaagcatgtgtttagcatatgcaaggtccccaagttcaagtcccagcacccaagtgaaaaaagtatatatgcatggatgcaggcatagtgacattggtcccacagttgctggtttcctgccttccttctttctgttggctctgcctgatatttcctgaaatacccatgattgaatgttatctctgtccttctcatgtttagccatggggcagagccaggctgtgctgtgttaagttggaggtagaaagttagactggaagcagatcatgggagagaagaaaaacatggggctcttgattgaggcattggatttcttctctgggtttagggatatgatcctctcctggagtgtggaatcaaatattcctgcctaggcatcccagagagaccagatgtttgttctcaacactggtcactgacctgtcccagtctctcaaacccaggggaatggccaaagggctcctagagtccattgtcctagaggagccaggtactggggatgacctgagttctcaagtgagttaccaccaggctgagccagttcatcttacaggtttgtgaggcagaaacaaacctggaaccaggctcttctgaatgccctgcacctattcccctctctttccttaattctttcaacacatgccctgacttaaaatagaatcactggttttatttctgttttaaaccatttatccattaaccttgaataatgtcacatgagagactgtatacttgaaccacccagctaagcgacttccaaattctccatcagtagaaactatgagataataagtaatccattattttaagccactaggatctggggtaatttgttatgtagcagtgaataactattacaatatgaaattctcattgttcattgccctttattagctctggtctctaaccacttcagtgtgtcctcctgcatttccatttattcttcttttaggatttatagtaagagattgctaaatactataaaagtaccattgttagcacaatgaagaatcatgtgtgtgtgtgggggggggctatatgtctgtatggacacagatgtgtgcacaccaatgtgtgcatgtgaaagacagaggaggatgtcagtatcctgctctattgatggctgtctgccttatatccttaagacagggcctctctctctgtctctctctctctctctcttttttttttttttgttttgtttttttcgagacagggtttctctgtatagccctggttgtcctggaactcactttttagacatgctgtcctcgaactcagaaattgcctgcctctgcctcctgagtgctctcactgaatctggagttagaccagcagctagcaagccctgctaaacctcctggatccacatgctgtagtgcggggttaataggcagggccatggggcatgagtactggagatttgaactcaaatcctcatccttgcacaacagacatccttgcctacttcctagactctgaagaatcttgctttcagatttttttactttaaacatttatatgtgtgagccaggaagatggctcaattagtaaagtgcttgccatgcaaacatgatgacctgagttgagatccccaacattcacataaaaattccagatgtggggtactagagtgctcgttcagcagttaagagcacttgctgctcctccagagcacctgggttttattgccagcactaacgctactgtttataatcatctgtagcttcagtaccagggaagccaatgctctcttctgaactccaaggtaccaggcatgtgagtggtaaacagacatatatgcagacaaaataaaccacatacatttaaaaatgtagtgccatccacttataatcctagtactggggtgctgggactcactggccatctggtctacctgagtcagtgagctcactacctgagtcaggtagtccactagtctagtttagtgagagaccctgcccaaaataataaatgtggctggccctggatgaatgacaaccaaggttgccctcttgcctccatagacacatccacatatgtatgtatatatacatatgcatatacatacacatatgcacacatgcatacatgacacacataaacacacatagattttttttttttagtttattttaaaattaaatttacaggggctgggaagatggcttgatggttaaaattgattttgcagaagacccatatccaattcctggatcccatatcaggcagcttacaacaccctataatactagttctaggcaccctgaccagcctctgccctccacaggcaccttcactcacatacacacacccaacacacagacacatgcacaaaccctgcccataaacacacttaatttaaaaataaattttttaaatgaaatttgccattcttggcatgtccaggctagtatcacattttatgaacacattgagagttttccctaaagagaaaatgattgcttccgtttgacagactctactgtccttctaacccagatgccccaaatggtaaccagatcttgcaagttcatctcttcccctatcacataacccaaagtctgagagaatggttgtgacttctccagcaatctcaggccaaggataaacagaactgtgcttcatctggctccatagatgtctctgataagcaccctagtgatcttctcagacatctctactggttttcctaagagggtactctaggaattttggagtatagctatgtgacctgctccaagccggtcatttctttaaagtttcatgctttcacttaaaaattcatgtggatttttaattctgcttataaatatattcatgttgggtcttagtatcatatttgttagtcaggctagtcttagttatatcttaataagaaataaacccccaacttttagtggcttgttggattgggaaatgtgcatagctcttgtcccttcaagagctgaggcattctgaatggtgcaaaattgtattgtcttacattccaatatgtctcaataaatgttttttaaattttggtgctcactttgaaggaaggacataacaatcttaatagcttaatcacacacacttttgcacacatgtgttgtttgattaagtcacacttttgcatgtgtattctgtggctctaccaattgatgactctggaatacttttgtaacactgacatctgttctctgaaattcacaagggtggaggagggagaggatataggaggcattgtataaaatttcctggtcaggcttgtaagtggtaatgcaactcattgaaagccaagccacaaggtcccaacagacctgcaagagaggcttagaggccaagtcttttgtgtttaggaagaggccagtgaaatgggatctgatatgtacatagtctcagttgcttgcaatcatgatccaaagaatagaatcaggttttctcctatcttattacttggtgagtagtgcccacttgccttgagtggtgactcttaccttgagtctgtaatggaggattgtagtttagtctgtaatggtaagaaagttgattctcaggcaaagcctcaagtggagggattgagctaccaacccagccacaaaacttctaacctatcaactgatgggaacagatgcagagacctacagccaaatattaagcaaagcttggggagccctgcagagaagaggaggtaaaattggaagagccagacggatcaaggacagctcaagaacagggcccacagaatcagttgactgggactcaagtgggctcatagagatcaaggagcagacctaggaggtcctctgcatatatgatatggttgtgtattttggtgttcttctgtgattcctgagaatgggagcagggactgtctctgactcttttgcctgcctttgggacccttatcctcctcctgggttgccttatccagccttgatgtgcaaacatgtgcctggccttattgtaccttgtgttattttgttgatgtccctggaaggcctactcttttctgaggggaggtgaaatgggtggtggcctctaccaattgatgactctggaatacttttgtaaagggggaaagaagaggtggaaggagacaannnnnnnnnnnnnnnnnnnntagttggtcacacctggacctgcttggtctagagcctagtgtataggcttcgaaaagaaagacttcatttatcaattgatgggaacagatgcagagacccacagccaaatattaagcaaagcttggggagccctgcagagaagaggagggaaaattggaagagccagacggatcaaggacagctcaagaacagggcccacagaatcagttgactgggactcaagtgggctcatagagatcaaggagcagacctaggaggtcctctgcatatataatatggttgtgtattttggtggtgttctgtgattcctgagaatgggagcagggactgtctctgactcttttgcctgcctttgggacccttatcctcctcctgggttgccttatccagtcttgatgtgcaaacatgtgcctggccttattgtaccttgtgagtgttatttggttgatgtgtctggaaggcctactcttttctgaggggaggtgaaataggtggtaccctcagggggaaagaggaggtggaaggagacaacaggagaggggagggaggggaaactgcagtcaagatgtaatagatgtaagggaaaaaaagctggttctatgcttggaggttctctttgtcactatgtctcatataaatggcttcttttactgtgtgacacgtggcatcagggtaatcacaaagcagagaggttctgagttctcctagcagtggcgccatacagctgtggcgccatatatacagctgtggcgtttggtgatgagaggttcccttatgtgtagagggagtttgtttaatgcacagaaacgtttaacactttcattctgatctcacccttccaccccgtcctccaaaacctcatccttagtgcctcactgcaaccctgccctggacttctctctgaaggtcactgccgcagggacagcagtcttccacctgcaactatgctggacaatctgtgcttttaattactgaattctgtctgtctcaccaacgctatattatatattttaacaggccctcaaggggcatttgtgcaaccgaggttatactgcgtttctgtttaggaaacaaagaaagagtaacgtgctccctattggtgctcctacatgaacacaaaattgtgagggtaaaaggtttgttggccctgtctggaagtgtaaacttggaacaagcataagcagacatagttagtaggtgggcgtagtttgaatctgggtttagagccatcatttgggtcttcttgcccactaagtgatacttctgccagtctactggtgagacacacatttttaacaaagaaacatactgataacttttttcacatgtgtgtttgtgtgtgcgtatgtctctctctgtgcgagatgtgtgtgtgtgtgtgtgtgtgtgtgtgtagtgatgtgtttgcatgcatgtggcctccatgtgtgtgcatgtttatggcagatgatgggaatggtctttggttattctcacacctgtttcattgaggcagcatctctcactcaatctcactgcttggtaaccctgttagtcttcccagttaccttgctctggggtcccttctgtctacattctgtaattatagatgggctgccacacatatccagcatttatgtggggtctgaggatctgaactcctgtcctcaggctttagccactgagccgtctttccagcagctctcaacggtaaacataaggcacagctcaccatcttaaccatgttaagtggctgtaactatgtttacagtattgtgcagccatcaccactgtccatttccagagcattctcaatcgctctcgaagaaacggtagccaggaaacaatacttcttcatttcccacctgccagcccctgtcaactcctattctgtgtcctgactccatggccctgcctactttagccactttgtgtaagctgagtcagacataatgctctcttggagcgaggccctgcttgctgtgttttgcctggctgcttttacaccgcattgcagaggtgagtagctgtgatccacgctaaatgtcccagggacctgaaaacatttgcggggaatgctctgaagaacaaagtttgcagactcccgaatgtgaccgcgggtggctgacctcgatgattatttcattagtgtgggagaggagcctcatttccagactgtcagggatagacttttgcagcataaatgaaaccaagacctttaactctatctgctcaaattcctagtggtttcagcctccctcagttttctagctaaaaggatgaaaaccatttggaaactatagttaacatatatttcaaaatagctaaaaatttttaaaaacatgttttccttaaaaaagagagagaaatatttgaggtgatcggtgtgctagttaataagaattaaaaacttcatcaactctgcatgccttgaaaccacattgatatgcagatatgttcataatatggagagataattatcaattagaaataaaacaaaaaacctttgggtcagtaagatggttcagagggtaaagatgcttgctgccaagcctgaagacctgagtttgatccctggaatccacatggtagaaggaaagaattgagtcctacaagttgactctgtcttttacttgctcgctgtgacatacaggtgcccatgtacactataaataataaataaatgcaactttttcaattaaaaaaaagagcaagaatatgagacattctgtcctggcttattcattttccttcctctgtaacaaaaaacatttaaaacataataacttattatagaacaatctagagagaatttcatataacatgtcttcatcatttgccactccccctcaaatccttccagaaccaaccccctacttcctgtctgtgttttagaggagcctggctcacagcaggtaccccagtccactgcctcgtatagtctttctctccactattctgcaacattccctgagctttacgtgcagatgttttgttgtaaaagtattaactgggaaaggcaccccatgctcacttggcctctacattttgaccaattgtaatgatctccatttgctgtgaaagaagtttccttgaggaggggcgacagctacatgcatttgtaggtaaaaggggagagtaaagattgtgaatgcagggtgatagataggggtctatttgttctcttctacatgcagacatacagttagaccagcaccatttgcttttttttttccattgtatggttctgccttccttgtccaaaatcaagtgtccataggtgcgtgggtttatttttaggtcttcgcttctatttcattgatcagcctgtctgttttaatgccagttttatgcagcttttattgctattgctctggagtgcagcttgaaatcagggatagcgaaggctccaaaagttcttttattgtacaagattgttttagctagcttaggccttttgttttttcatatgatgttgaggattgctcttttgaggtctgtaaagaattgtgttggaattttgatgggaattggatcaaatctgtagattgctttcagtaagatggccatttttactatattaactactgatccatgagcttgggagatctttccattttctgatatcttcagttcaagattacaagtggtttaggaaagtggtagtaagtagcatgctctcctctcggcccgtggcctcaccagccatgggttgttggctaggtttaccttgcaaagcttaaattccttcctgttgagtatgccttacttctaatgaggtcactgatggttacccctggatatatgtgccatcattgtatctttcaggatatcttcctttgctggccattgttgtccttcattcgcctgatagctggacagaactattgagtacctttcccttttgccatcttgcatggccctttcaaaacctatgaggaatggccgtccacgaggaggcttccaggtcaaatctagatcgattcctccgaattccgtgttcaaagtgtgtggtggcttcaagaataagctcttatcttctattgtggaaggcaccaagggcaatggcaagagcctgtattgtctggggaagggtctcttggactcctctgaccaacaactggaaaggactttccccatgcctgccactgaggatactgttggttagtctatagttttggggggaattattgtctccccaatttttgatataacttcaactagaaatctgtgtatatatatatatatatatatatatatgtatgtgtgtgtgtgtgtgtgtgtgtgtgtatgtatatatagatagatagatagatagatagatttatatgttttatgtaattttaagtggaaataaaatgatacaactatttatggtttttcaaaacacccttagtgctatttatcttttccccttccttctccttctgtggtgcctttatccccagcccccagagaagtcttcccagtcttatttctcccactgtatggtaactgtgtcctcctctttctccccagactccctctggtcagcattgaccatgccacacatttttttttcctaattgtgaaatgatactggataaatcagctaactcttcaggctccctttccattagtttgagcgatgaatttgtttttcctacttagattttgacctttctttgttttatgatcttatctcctccatgaagaaaaatagagtctgtcttagagttctaaagtcacagcagcccctgtcctcaaactcatttcttagcttactgtatgcttcaaaatacaagtcatgtgatcatgatttcttaccttccaagacccttcacttttactgtcccaatgagcacactgtatgatgggagatggtgtcttgtgcagagctacctggtacctgtcatgtgacaagacaacattttcataaatatctgcactataatgatacttggcaaaacttcaacaaaatgatacatatcagagtttggcaacatatctctaaagatctagatagtcaatacctgcatcacagaatatgcatgtgtgtgtgtttgtgtgtgcatatgtgtgtgcacgcatgcaatgggtgttcacatttatgtgtctatgtatgtgatgttgtatgtgtgttccaatgtatcttagggttttcattgctgtgaacagacactctgaccatggcaagtcttataaaggacatttccttggcttactggttttgagattcagtccattatcataatagtgggaagcatggcagtacccaggcaggcatggtgctggaggagctgagagttctacatcttgttccaaaggcaaaaaggagaagactgatttccagacagctaggaggagggtctcaaagcccatcccccacagtgacacacttactccagcaaggccacacctaatagtgccactccctgggccaagcatatttaaaccaccacaccatatatacatacatacatacacacatacatacatacacacacatacatatgcacattctcatatttgtgcatgcagaggccagatatatatgtatatgtatatgtatatgtatatgtatatgtatatgtatatgtatatgtatatgtatatacacacatacatatgcacattctcatatttgtgcatgcagaggccagagcaggacattggctgtcttcctcctttgctctctgaattactaccttgagacagggtctctcactgaaatggaaattctcttttttttttgctaggctggatttccattaagttctctgaatctgattgtttctattcccctatgtttgtaccagagacatacacagccaagtctgttttttcatatgggttctggggatccagactaatatattgataccttgcaggacaagtgctcttaaccatcagtcacctgtctatctctgtttgttttaaagacaatgtctcactctctagtcaacgctggccttaaactatggatagtcctcctgcttcagccttcctggtactaagacgataggcagaaatgatcacacagcttacttctaaagtatctttattccaataaaactttattggcaaaaatagataataggtcacactctcttctaaatgatcccattctttctcttaaccttgtctcttaaccttgtctattttttaaccttgtctatgtttatgtgttattttttaatctctctttacaaaccagatggcttcatggggttatagtagataacccacacatgagtgccaccatacttagacacattctccttgtttctacaataaccagtaacccatgtgcggaagccagagcaccaagtatgacctgttctgcattcttcttcctgctttcccaccttctggtcaatactgtccacttaacacaattcaacagctccttagtcctgcgtgttattgtaggaagcctgaaggacagcatgcctgtggtgtgaccttttgcaaattgagatttctcttatgttcctcttgtcttctttcaaattctttgtgaattcaagtatatttccaaattctagttttagttaccagttttccccctttgaaaccatataggaatataaatggaaaacaagggggaaaatcataaaatgcagtaatgttctcatttctctgccaagaggaaggtagagcgagtgttgggaaatagaaccaagtattttgtgaattgacttcttggtaagaactggagttgatgggtggtggggacaggtggggaggcagttttctgtaattaaaatgtctttttcccctagggcagcacattctctagttctccagttctagctagagggccctcttccatttcataaaaagagcccacctcctagcttgccttcctgtctcagaaagtgaccacatgcatcgaggcggattccaagtaccctgacaaactcctgagctttaaccctgggtctccccagccacagcagtgccaggaccctcatctccccatctgtgagcatttcccagtcttggtgtttaatgaaggatcatgctactgcatggaaattggcagaatttttacaattctgctggcatccacttgtaaaatatttatgggtttttaaacttcacactatagaattgaaagttcaaatctgcctttcttctcaagtacaacccttggtacatagacctctgttttctatttggtaaaatggttatactagtatccatcttatggtattgttttgttcattcggtaattcacttaagcaatggttcttgactatttcgtgtgttccatacactatatgatatctctgtgagacccaacaaatgatatatgccaagcagatattgcaaggattaaggataaaatatgaaatgtatcttagatataattaactggtacttcataatctaggagatgtgttgctatccaatgatcacactgttcatggttgttaggtgtcccatgtcacagcaaaaattgttgtctttattcctaacacatcttatcttttttttttgactttttattcatgtgttaagttgtggtgttcatttatgttacaaatgactggccagatcacatatatgaccaggtctgctcttcctgtagccctgtctttccccagttaatttcctgggaaaacacacaaccacacatttgtcagttccaagagagggaaacatatttatttatcaccttacccaagaccttgtgtttggaagagcaacctcatggagcatagacccatacctttaaagattattattggcttaagacatgtctctctcattctgtagtccatgctgccttggagctcaccatgtagcctgagctagccttgaatccatgaagctccttcctcagactcataggtgctaagattatatatgtatgttatcatgtcttgaccacatctcttcactagataacactgctttagttaagatcaagacacttggagaatttaccattgaaaccattgaaaagacaaggtagatggaaaggggttttatagcttgggaccagctaagatatccaaccattctttatttcattaatatatacagaaggccttatgctcatgttctggggacacagaaacaagtgggatccataatctgctggagcaagccccaagttggtcttagaaatctcacctccttagtttgatggacttcctccagtgtggccccagatggctgttggtaaacattgggattggacagacattgggatttttaatttccagtagtaggtcataatatgataacatagcttctacctgtaacttttctgtgtgggatccttccctttgggggaatccagtagtcccagcataagcaatcttctaaagggacccatgtgacctccagacaatagccatgggtatgagttctcattggcctgtggctggtaggtgttacagagctagcaagttccatgaaaagtcaatggcgacataacaaaggatgacaggacctacagcaaatgagacttgcagtgatgttgaatggtaaagaggagttggccagagacatggtggaaagtagaaaggcatatatgtggctgctccaattgggtggtattgactagtttgtcaagactgaggggtgggtctggattataagccatggaactagggtttccaccagggggaactggcaccgtgagcatgggccagatcatatgagcagtgcaggctgtgaaagctctgtattggatggcatttcatgtggcaatggtcattctctatctgtatgatccaataaggtggaccagccacaggtagctattaaagactagaaagactagaattgcagctagtacaaggggggaattgagcgaaacatttgattacatgtcagtgagattgaatttaaatttatctgtgacactggtggttaccatagcggggactggattcaagctggtctgtggagatctggattataggccgtccttcctagaatttggaagaattcattgatggctccaaaggatgggtggaggatgacagaaagatgttgggagcagagttcaggagaaggatgatggctttcctattacctgcattctatggcctcttgtgctgtccaggagcaccaggagcacatgagaactggatctatgggagctaagtagctccattcctgccaagtcactcctgaatgaagcaatgaaacccccataatgccaatttctcaatggcaaaaggatacatatgattaccacctttacagaggaggcttgtccacagcctctggcactcacagaagtatctctccacagtagaattctatctggacaccttctgtgtatctggatctctaaataggaaggctacttactatctatgcattgacatttgtacctgcagaatggaatctaagcactatctaccttatactaatttcatgagcctcaagtgagccaaattcatataaaccacttatgagagcgaatggcacattttagaattaaggactgcttggggataggtagatggctcagtcagctaagtgtttgctgtgctagcatgtggaccccagcacccatgtaaaaagctaggtatagtagtgtgtgcctgtgaactcaaaattagacggagttgtggggtaggagggtaaaggcaggtggatcctcgtagatcattggtcagccagcccagccaatcaatgagctctgagttcaatgagagatcctcaaaatagaatacaactttacttctgaccacacacacagagggggggggggagggagagagggaggaagagagagagattctcatttgcatgggctcttatgcaaacacaaacatgctcaggaacacactacaccaaataaacaggctcacacaggagaattgaggactgcttactgccagttattttgttgttgttctcagaaccatctctgagttaggaatctctactccatacattgacttcttctcacctcatctgatgtccaggactcatttagaaactatccctcagctactaccaaggggaattctggggtagtccaacaggatgttgcagagggaaagccaggccttgggttgaacaaattggaggaagatgctagaataatctagcccatttcatcacatgtcagttgtcttgaaatgggaggatagatggccagaagctgatggctttggctcaagtgtgacacagcagatgtgggagcaccctgggcctgtgtcccacctactggcactggtaggggagcttctctttgagaagcaatctagatggagctcccccgttctttcttccctgtggcctttggaaggcagagcacacgtgcaatgaaatgttaattggcaaagcttcagaatatggcatcaatgccaagcactggttaatatcgtgttgatgcacaatcttccttccttttgttcagctcacagaatgactgacttagagagatgaatgaacgctcttcctgtgagcctggccttactctgtgatcatgctcacctgacttctctccactctcacctttcctggcacccgtgattcacagggggtaaatttactgtgacctatttctcacctctgtcgttcacttgattgtgcccagactgactactgggctgtccctttcgcaaggagacacacttgcctcttggcttttgtactggctggccttcctttgcaccgaagcctttgtaccccacctctgccctctgcagcgccactccctcacaccctccaagtctccccatgtgccaggttctgacccctctacgtaaggtgatgtcatcctcccgtacacttgctccgccttcattatgcttccccacattgttcactacatttatgtaatttaacttttttttttaatcacttttttgggttttgatgcctgacaccacaaattagcagcctcttcaagaagtgcagtttcagccctgtgcagttcattctgatctcatttcctgttttactgcctgccataggttgttgtgtgaccctcaggcatggactgtatgagcctccaggctcccatgctgctgttcaaggctctgacccccaatctctctttcattccactgtctcaaggttctttccacttgcctgtcacatctgtgttgcttttgacaaaatctcaaatgttaaattttaccaataaggactggggaaccagttgctggggtgaaagcctgctaactcaggcagagaaagcacccagctgacctcctcctcagccaaaatccccaaaggaaaagtctcctccacaccatctcaaaaaacctcaaactgaatgtccctccccctacactcttagtgtctctctatccatcttcttgaccgtctcttactttctatggcttttttttccctcttatgttcactccctgtcaactggttgcttatttcgcttctggacctatggttgactttgtttaatattgtttttctataaacagaaagtttttagactgaaggcatatgctagggctgagctataccacaactagaaacaggttttttttttccccagtaaacaacacaatcttggggttcacggtgtgatcaaatatccttactttccgaatctactgatgtctcagtcaactgtctttggccagcagatgttcaccgcctcctgcctctaaagactctctactgggtacatccaacctttctaccctgtcacatgacattgtcgtctacacagttcactgaggactggacttgtaatcaagtggcataaacaatatctcataatgttttaagttagtttaaggttttatgttgagccttagttatcatgagtcttggtcacatacacatgtggcctcacgtggaccatgagcttcaggctggggaggcctgggacccatcttgtcatcctccgtcatagtcgctcactgtcttggcttgccttgtggtaggcagtcattcctatgggcagctcttgggtctttagtctttctttaatcttcatccttctgttagttctttttcgtgtggctttaagaaaatacccgatgaaagcagtttaatgaaggaaaggtttagtctgattcacaatatagggcagcaggagcaggaggtggctggacacgttgtatccgtagtcaggaaacagagggacttgatttcttgtgctcagctcacttctttttatccactcctagacccctgcccatgagatcctgcgaccttaataaacttaattcagacaatgctgagacttatcttctaggtcatgctaggtcctggcaagctgatatgttagccatcacaaatgcccatgcatcaacttgccttggctttgagttaggacaatggccattggtgtcaggcatacctgggtttttctttcactgctcagaatatttggtcaagttaaagtagaagtgatgatacctatctgagaagttgtcaggagaatcaaggaaaatgacatgcatgaggccacatagcaagtgcttgagaaaagtaatgaggggctgtgaaggggagtcctgcatgggaggggggatcagtcatgttaattaaagatatgttatttccatgtgctgaatttggaatgggagattgtttttgttccacattagaataatgagcacactcttatctttattgaaatccttctgcagaaagaggcgagctgtatttgtgtcagagataatgctggctttttataagctccgtgcggtagacaatagcagggccttttaactgatgtgcttaggatttttctgtctgtccctttataaggtctgtcaattccagtcttgccttggctttcaggtgacttttgtgacacttgtaaagtcacttatttgtgaattatggagggtatttgtctacacacacacacacacacacacacacacacacacacatctatctatctatctatctatatatctatctatctatctatatatatatacgtagtcttgcatacatggacatacacagtatacctggggagctgtttgcttacgaacacatagatgaatgcatattagtaaatatgcatgaattcagtattgtggatgctcctgtccatttacatgcatatgaacatgttatactcctgcaggtaaatcctacagatatagtagatcttcctagtcagctctagcccctgggactgagagctaagtggagttggctggttgaggtaaaggaacaaaggaaaaactggggtccgtggaaactactgtgtagttgctgctgtgccatgagaaatgctacctacattaagcagggcaaatggaaaattaggctgccagaagcaaaaccagaaatggaccatagacaggtcgtcaggtgtgacaatggtggctgtcagcatccgctgcaaaaggtttgaaatcactatcctattctagaaggctatgggcagaggctctggccacctaccctgaaggatttactctccttgggagggaatgtgatgtgagtattccaagatctcaggaagaggcctggacccagcaaacagctcctgagttgatgttcttagaggtatatgtccctgtgacagggggcttggcttgggaggggagcagatcacctgctcttatctgaactcccattgtagctatgaccttgggtagatgctcagcccccaggactaatgaggggattcaatagcatgatgatatagatggagtattcagaagcttaattctggagagcagagagacattcaggcaatacagggtcttccttctttgcctagctgcatggtcatttccccatctccgagttagcaagatccttgtgggcaacagagaggcataaaggagacataaaatgatgtgcttagcaaccatggggattaaacacccaacagtgtatgcaaaggacacaggacatgtgagtttaaaataaacaagagcagaagaaacaaagcttgaggcgagagacacaggagccaacccggagtctccccacaagcaaagcctagctgtgtacggactctgggtgcctgtgcgatcttggacaggtcaccttatctcttcggggtgtgagggaggtgatgattatacctactttgtacgtcataggatattcggatctcttcatggtagggacagtggtaataacccaggacagtttctcaggaggcatgtgtgggagaggtgggcaggatgacttgcggctcttgagaaagtgcagtggaggggtcatgggtggtggggttgtgggtggagcagtcgtgagtgtgaccaatcttgtgacttccacttataccactttccccattgagctctctctacacaggctacctctcattcctcagagactcttgctgcctcagagcccatgaccagttctctttgcctgagacttttccagtgttttgaacaatgggctccttctcactcttgggtccagtttcaaatttcatcttcaatcttgagaccttccctgcccatcctggccaagaacacactcatggttcctaggtcaactacccaattccaagctctgtccttcttttctaacctcacagtattagttacattcttgttgtctggcccactgcagtctacacataccacaaagagctccatgaggattaagaggctgagggcctcttaatctctgctgtctccatctctttagcccagcactgggaggtgatgccgagtgattatggatatctaatgatctgagagtgacatctctgagtccatttaaggaagtaatttgatactttaaagactgagtcccctcccccagaggtgtgtgagctcagacagcggccccatatattgctgatgccgtagacagctggtatatctgccttcagcagaagtttagggccttaatgacacatagcttcttcctatgcatctaactctggctgggagtagaaacagctgcagcgtgatgccctgtctgattggcttggtgactcagttgctaatattcagctgtgctagccatgaccaaaatccatcctaagaaatgggtcagatggacatggatttctgatctgaggtcgtcagatagcttttgccttgcctcaaactatcccacaacttaatggcttaaataactggcattttcacttcccttgtgcctggtggtgctctgtggaggtcttatttagaggctcttgggctctgttatgtctaagatacctctctcatatctgtgttgtttggcaggctatcacctcagaaaccttgggtcttctctgaatggactcccagccaccagtgtagtaggccaggttcatgcttcatgatgctttcaagcttctgagtgtagccagaaggaatttcctatgtccatgctatctgtgtgtttatagtgtgtgtgtgtgtgtgtgtgtgtgtgtgtgtgtgtgtgcgcgtgcatacatgtgtgtgggtatacatgtaaaaaggataggacaaccttgtcctcccctagacaccccagacactgtttcttaagagagagtcccttgagtttgcaaaatgggccatgctggctgcctagtgaccctctaggggtctgcttaccgctgccttcctagtgttgggcttatgatttcacatcaccgtgcctaacagtttttatgtgggttctaggcatcaaactcggatcctcataatattttatcaattcagccatcccctctgctgcacaagcttttcaaagcctctgtcctggcgtgtttgttgatttctttgtgaggaaacttattgtcagtgtgagaagtagaggcacaaaggtgtggtcatgaggaattagtgagacattgctaacagtatatcctttgtgcagggaactccacgcactgtaagccatccctttgatttcattccccttttaaagtaaggacttttattgcttcatagtcatagacagggaccccaagattcagggaagctaaagggggtgtgttcacacagttgggattgactctgagaaaactgcatggagatgaatttaaatatcaaggctgacttggcaggagagaggccaagctggtcctggtgaaacagagggctgggcctggagggttggaggtctggagaggggagcacacaagtgttctttgttcactaattggcctttgcaaaggaaaagtaaatgttcttataatttaagaacagcagagcattttaagagttcaatcaaggcaccctgagttagactttaaccttcccacggaggcattgcccctcgcctcccagctagcatcttgctatatagcctgggatcctgccttagcctcatgggtgctgagtgccaggaacatgtcaccatgcctggttggctggctggctttctctctctctctctctctctctctctctctctctctctccctgccttcctctctgcttcctttcttctctctctccctacccctctctccctccctccctttctcccccctcctctctgtctctctgtctctctctccaaggtttgactcatcctaggctgtccttaacctcactcaccttactctatatctgaggatgaccttgctgtgaccctccagatcctgctccctagtattgcgcagtgtgtaccacccaccgggttcatgtgtcattggctggggtcagatgcaggatttcctacatgctaagtaagtactctaccagctgacctgcatgaagcttctgtttcaatgagatcttatccaggtccccagagaaggacatttctagtctatatctattctatattcattggggttcactaaaggaataagtctgatagaataaaaattatctatatttatgtatctatatacatatctatctatctatctatctatctatctatctatctatctatctatctatctacgtgtgtgtgtatgttttcttaagaatgacctacagactgtggtccggctagtccacagtagctgttacccagtggaaagggcaaggtctgatagttgtttagtttatgagattctgtgtctcagctggtcttcagtctatgcaggaatccctaagaggtggattctaaaactggtgaaggactgcctcagcagcaggatgaatgacctcgccagcctgagtgagggcaagcaggcaagaagcaaagcttccttcttccgtgttctttatgagggctgggctaccagaaggtatggcccagatttaggatgggtcttcccacctcaaatggtggaatagagaaatccctcatgggagatcagctgcttgggttttaattgattccaaatgtggtcaaattaacaccaaacattagcagtcacagagcaggcaattgtcgtacatgttaaatgggcagagaaagcatttgcatttataagtatcctacactaaagttctctaagaaagtggggagcacagcagtgaggaagaagtttgtgtgaaggttcattagttgagtggatcaatgtggccatcttaaaacagtaattgagacccaggacctacctgatgcaccaacgcacacttctgctctgatttctagtggcttcctgcagatctggctgcgtttgggagagatggggctgtcactcaccactcaccatttagcagtagcttctagaaagtctgccccatttgaataacacgatatttaacatgcctatgggtcttacaaagctgcagatgcagcatatagttaaaaacagatcttaaaatacgctgtggaattctgagtctgcaatgtcagggctgggagggcccaagagtccgcattcgtctagtcccttggctgagcaagtgagaactaaggtcttgtccaaggtcacacagactgggctggatcggaggctgtaccccggactcccaactcctgtttccagtgccaagttcttcccaccccatctccaaggcttcaaggcagtggttgctcctgttttcctttcttttctcctcctttcctttctttttaaaggctcagtagcagctactgctctaaggcagaaaatgtattcatttaaatgacttcgtttggaaatagaagcttgaataatgatgttaccatttataattgctctgattaaccacaccaccgttttgcagtttagaataaaaaaagcctcatttcctttgtgatgtgaattttaattgctttctctcaggaagaccccttcaggcagaattgtatgcttctcagtttccagaacatcagaaagacccctctgtgtcttggcctgtgtcagacctgtgtgcttggccaaggctgagcataggcatagggagatgttcatgaaatacccagtgggtggagattctgggagagatgctgttgagtctcacctttcaacctacgcgtgatacttcccagggggatcatagcatcagggggtcccacaaagcccagactagagacctgggataaggggatttgagacttttctaagggtgtttaaagctcctgtagatgtcatccttaagattatatacagggcaagatcatccataattcatctgccagtgaacccgtctatgtcttctcatgtggctttttctgttcttttctttttaatctttaagacatttcagttgttgtttgacatttcacccatacaaaatcagaattagcccaatgcagtgaggaaagacaaaggtttaagaaaatataggtgcatatttatttgatcttgggtagaagcaagggatttctgactataaaagccaggaaataaattacaaggttatatagggtgatggatttcgtgacacagaagtcagaaatatttgtaagtaaaaatgcagtcacacaaaagttaaaaagagagcaaccccaggaaaatatttataacacagaagattcacaatagttaaccgtttttagtatataaagaacagtaataaatagctgagagtctagtgtggagaagagtgtgaactgacaacccatgtgagaaagattgccagtcagtaaaaacctggggaataaaaaccaacaacccagctttacaactgggatgtaaacttaaaaagacagaacgggcctgaagagacggctcagcctatagagtgcaggccttgcaagcacagagacccgagttcaatccccagaacccacgatcaaagcggctgatcatcttaccttgcatttactattctgatgctggggaagtagagttaggtagagcccaggggctctctggctagtcagggtagctaaatggaagcgctccaggccaagccaatgagatatcttgtctacaaaaacataatagcacctgaggttgtcttctggcctccatgcggttgtgcatccacatatgtatgtgaaccaacacacatgtgaacctacgcatagacataagcacatagagagacagacagacacacacagaattattttctctatttacagtgttaataacttaaacagtgatatggttgggactgaggtgatgtggttgtcagcattgtaagcgcccatgatgcttctggagtgcagtatcatagttatatagtcttaacaatagggcacatccaagggatgtgtgacaaggatggtcactgcgggcacatcccagtcctcaagcatgtagtcagtataggtcaatgacttctgtggggcttcttgatgcaactattcttgagaaataggaggactggtgtgactctgctgggggagagtgtgtcctgctagttcccaaggtattatattatattatatcaatatagtccactgctgtgcttctatgatcattatcaactatgctgctatgtttctatgatcataactgtgtatactgtgctgtcatgtgattggcgccaaaatctgcaccaccaccactacacacgaggataccgtattatgcctcggtgtaacaggtgcccacgttgtacctgtgggatagtctcaggtgcagtgtaagctttggtgcatctgctatggagtgtgttgttaactggactgtcacatgaccatctggttttagatattaaagggtacatatacactgaccctttaatttcatctccagaaattgattacttctagaaactaattagggacacttatacaaggtaatgtaaaattgttttatgatatcatttatgatggaaaaatgaggaaacaaaattaaaatatctagaaataaagaatgccaaaaatcattctaatggtttcattttatagttgtaaaatgaaagggtcagatcacgtaatattgaataatgtgatcttacaaaaagaaacgtcacactatgcttagttgaaaaattaacaggtcctggggtacagacctataattccactggtttgaggaaccaaggaaagatgatcatgagttcaagccctgcctggacaacttagtgagacctgtctcaatttacaaaagtaaaatatggctaagaatggagctcattgtagtgtatgtacatgcatgtgtgcatgcgcgcacgcacgcacacacacacatacacgcacatgcttagtgaattctcttttagatgcaatatttatgtttttttaaggaaacataagcatatataagttaatagaaggaaagaaagctaagatttatgacttctgttccctggatggtagattatatgtaactgcttggaaggaacttgcaacctattttgcatatttgctaaagcaaatacttttcagttagggagtctaataaaggataaaataaaaacaaatgttagtgaaagtgaaagagtaagcttgggctagacgcatctgcgtggaaagaacccgagacgtcctagacgagcaaagacattgaccttgttggcacttttgaatctatttttgaaatgcttgcaagtacaggttcttgcaagattgttctgaggatgaattcagagtacaagaaaagagtgggactgaaaagactcagtaaatattgctagaatcttctgttcccttcttagtcttgtataaaatgactgatttggatctgctgatcttaaatggccttcaaagttgctcctgcaattttctctttattctatgtgaccacagcctcttgtttgattctcccaaaatgaaggctatcaggctggctgtcaaggctaaatcagttgctatgataaaatgtttgaatgtgtatatttatattacatcatatataaccttctcaaaagctacgtataggtatttcctttctgtctcttctttcttaccattgtgacagagtattctaaaattcccagaggcggtaaagttataatcaaacagttatgtgcataccttgtcagtggacatacaactcatgtagcttttgttaggaaggctggcaaagtagctcagtgagtaaatacacgtgcttccaagcctaaaaacctcacttcaatccctgagacttaactatcacaggaatagaggcatgcgtgtggttacaagaacacatacatacatcaaacataatgtatacatacacacaataaataaatgattattttcaaaaaaaattgaaagcatcttcatgtattttcactcaacaatctcattgaaagtaatattctaagaggtaaagaagatgtgtgtcatagtttctcaacaatgagttctagctctgtcctttctagggttttgggggaataatacagaaacttagttgcttgtattcatgaaacccttgtatttagagcctctttggcaagggacccaagctggtccatccagaggattgcagtgcgatggcttcacatccctgatacagttgtctgtctcctttgtctagatggaagtatccagaggacttcatttatattcataaacttggatttacatctgaacattgacaggaaactgacatgtgaacttgactaatatgtgttccttctttgggcatgcattttctcgtctgtaaaatgggtctgctcacacttcctttgcaaggatttgcatgtggggagataagaatagttgatcaaaccaaatgtccaagtctattcttatgcccttgtacttttttttctcgagtgaattagaatgatagtttagatgcttaagtatccttgtgtacggattcttctggaatctctaggaaacagccaggctgccagagtcctcattcaagtgtaacctccagacagggctggctaaaacctttattagccattggaaccaggggtggctatagggttggtgggaattctccatcatttcttcaagtgtcattaattccaagaaggtagtttaagatatgctctttgcgattattttcattattattttatattttgtgttttgcatgtgtatgtatgtatatgtgagtgtggcctatgtgtgtggtgtatgtacatatatgtgtgtttaagtatgtgagcaaatgtcttttccttattctctgtcttagtcagagttttactgctgtgaacagacgccatgaccaaggcaacattataaggacaacattttcttggggctgtttttcagattcagaggttcagtccattgtcatcaaggcaggaacatggcagcatccaggcaagcatggtgcaggaggagcttagagttctacatcttcatctgaaggctgctagtggaagactggcttacagatagctaggatgagggtcttaaagcccacactcacagtgacacacccattccaacagggccccacacctactctaaaaaggccatacctccaaagagtgccactccctgggcctagcatatagaaattatcacacttccttgagacagggtctgccagtgatagctgagtttgagacagggtttctcactgatcgttgagtttttgacaagatagcccactgatttttgagtttgacacaaggtttcccactgattgtgcagctatgctcgcaacgatcaaacctagcaactcctctatctccatatctcatagccctggaattgtaggtttgttcatagcccccctgtgcagatttttatgtggatgctaggatcatatctccagtcttcctgctagtaagcatgcttaaccatggaatcatatcccagatccccaagatagaaccttttatggaaaatgttttcataattcaaatgtataagttttagatataagaaaaaagtaatagtatattttatgcttactcaaacatccccattggttgtattttttttcatgtgctttttaaggctgcttgctttaacacaactgataccatgctatgtgaatggccatacattctgatttttttcattaataaccatatagtataatattcactcattcatgtttttaaaaactctttgtactctttgtaaaagtatctttacagatatgactcattccatttagtaggtagctgattcataattattcattttgattattttcaaatccataaaacagtgctgttttcatttctaatagttttgtttcttgttcttggtgtcaatattagttattccaaaaattattttcttcttcaggctttctaaatattaagctaagagctacagaattatattttagttcaatgtctgaagtgatatatggtaaaatctttaatacatgctagttatttttttaatgttctattgcccataattttcatcaagaattgaagtggcacagtggttccgatgaaaaagcatgatacaaaagaaagcagactgtgcctccctgactcggagtgactgctgatggcaaatagaaaatgacctttgcaaatgacacatggaatctgtctctatgagtgtttatgtgtgtgaagagtgtgtgtgtatgtgtgtgtgtgtgtgtgtgttggatgtgcatgtgtgtgagcaagagccaaaggaggacactgagcatcttgcttggtatataatagcttttgttttaatttttgttgagaattgggatcagtggggggataaaaagaaggtatgttcctttgaggagataaagaaagggatttttctcttttctgtctccagtcttagtggaacttgtaccaattttctggagtcggtcacccagcactcgcaattgcttttagcaggaaggatcttatttcaggagcctgtgaagaggaaaaggaagtctgcagactgagggacagtgttgaatgacagaggctgacaggagctctgcttgtgtctatggtatggaaggtatgagaaaggctgtgtgtgtgtgtgtgtgttggagtgcaatgtgtggccagagagaatctgggctacaagaagaatggagaggcaatgacaaacttgcccaaattcttacttgctgggatgggcaaacgtagcgccctcctctgggcccctagatttggctgtgatatgacttagttgtagttagggagatggtatgaatggtgtttatgaatggaaggtgctaccagggaaggcagctgacttcactgtgggaaggcctcttgctgagtgcttcctcagccatcttagtctggtgtccagctgctgtggtaaaataatgctgacaataaccaagaaagggataaagggcttatttggctcagtttcaggttacggtccatcactagtgggctagtcaaagcaataggatcttgatgtagctagtcacacaacagccatactcaagatcagagagcaatgaactaatgttcctgcccagctcaacactccttttcatttgctctggggcccagcccatgaaatggcaatacccatattcagagtgtctctttcaaccttggttaatctgatttaagaaaattcctcataggccaacccacaggtcaacttaacctaaacaattcatccttgagacttctatcccagatgcttctatgtgatgtaaagttaacaaaattaacaatcgtgtcctatgatacaaaacctgtttgtgagctcctgactcgccagcaagaaagatgccacaacaggatccttctgcacacgtttattgggagagcttgattgcagaggcgaaaaagaccccgaaccccagtactggcgctgcttatataggcctaggagaggcgtgtctacacccgattggttatgctttcaatacctcatttacatgtccacacccgattggttatgctttcagtacctcatttacatgccccgggccaggcagtgactcggcaaaagactctactgcacatgtgcactttggttgtttacccaaacttatgggtggtggccagcggtagccagcgccaccttgtaatggcgtatgtggcttcccacacctgtttatccaggatcacaagagacagcactcaaagacataatgacagcactttaggggttttcctgccttctgtttacacaccccagctctctttctaatgtctgagaaaagtaaaaccccggtgcctgaagtcatcataccaagtaggatcttgtttttataactatcagatgatgtagctcattacttgggaactgtccaccatttgtagaatgaacagaatcccagtagataattccaaagagaatttattcatttctacccgaggtaggtgtgtgagcctgcttggcttttccctattttatgctgtgtgaaattccaagcaggtatctcctctttgagccttcagtcacattttgcttggcaaggtaaagatgcttatttatatttaattagtttgaagcacataagaggagtagctgctatagaccatgtagcattccattctaagtgatgttagaaacagaataatctccttggccagtataggaacacataagcatatgaaaatggcattgcaaggcagtttctttttgtaaaaaaaagtacgtgccagaatccacaccacacttgcaaacacacttggccaacatggcctctgtcttcctgaagtgtgtggtgactgtgtctcaccctattggtggggactcaactttaccaggagatttgattagctaattgatgcaaaggggaaatttcaggaaatatgaactcttgccaggctatctacctttgatcggaataaaacaaagacaaaaagcaacaggtttctcaccacagagaggctgcatttggggctaaggaatgagcttgctgtgtgaacaggtttactgtttggggaagatagtggtaatacaccagagatcaagtcagacaagtctgggtagaaaaggatggggaatattgagaaagaatgataaagagagagatgaagacagtgataaaaagctgtgacggtccctctgaagaggtgacatttgagctgacatttgaggcccaaatgtcaagagtgaagctgccacatgaaggcttgggcagaatctcaggttcttgtacttgcctttctgtctccttcctgagacttagaatttcttcagccattaccacatcaaaatggcacacagtcatccagttgttgaatcagatacccaggtattagacttacatctatctctcgatatcaaccatattcccggccagaaggccagaagtcatccctccttccatctctgctcctacttctggctaccctcagcttggctgcacaacctcctgataagttttcccatctccactcttgtctttcttttcccacatcccataattaatctccctctagcagttgaattgtgccgatcagtacagtaactgccagccacatgtgagtgtttaaaaggaaagtagttagaggatccaattaagcattcagtttcttagtcacacttgccatgtttcaagtggtcaacaatcatgtggccagtgactaccatttttgacagtatatccataggacatggcatcaatgcaggaaactcatgtggaaatccagaatcagtggtgaaataccaggtggtggttgttgttgttgttgttgttgttgtttcttcttcttcttcttcttcttcttcttcttcttcttcttcttcttcttcttcttcttcttcttcttcttcttctccttctccttctccttctccttctccttctccttctccttctccttctccttctccttctccttctccttctccttctccttctccttctccttcttcttccttttcttcttcttccttccttttttcttctttctttcttcctttctttctttctttctttctttctttctttctttctttctttctttcttcttcttcttcctcttcctcttcctcttcctcttcctctgcctcttcttcttcttcttcttcttcttcttcttcttcttcttcttcttcttcttcttcttcttcttcttctacttctacttctacttctacttctacttctccccccccttctctctctctctctctgctcagacccttttgatagctcccttggactaaactccaaacactcactcctccagagcctcacagtctgcttcttaacagttcagaccagatcaccctcttcccttccttgaccacaagtttgtagtcagacccccatgttctatttctagaatacaggagcttgtatactccttggagggcttttataagaatttacaccttgagttgcctttctacagaatgcccatcttcctttctccagcacatcacaaacctttgtgttgggtactaattaatagcagctgccattttgatctcaaaatacacatggcagcactctgatatacgagtttctaaaaataaaagctttgtctgatatttaatgctgtgacctcggtgcctagaaattttcctggcctatagttgggtcagttactctttattttaagatcaacataagaaagcagaaccgggggagccttttttgcctgaacttaagaaaaggcctttcttttccttggctgacatctgccatgagcatccttcataactgagtcccatagtgggttgatcaattccaggcaggaggaagagcaaatataaaagctgggatgtgtttatgtgtctggggaagaacaaggaaacaagcaacaaaagccaaacgccaagactggagtgtttaatgcacattttatgaaggagaccttgtaaagttttacacacacacacacacacacacacacacacacacacacacacacacacacaaagagaggtgggcaggacacagatcacatgagcccaagaaagccacaaaaaggaaattatattttattccaggttcagtagggagccatgggaggtttttaaattggggtggggagagatatcacatttatgatttattcactctcacagttttatttccttgcctttatgggcaagtctgttttttaacattttttacctcaggtaaaactactacttgggggtagtttttttctctgagactgtctttcccaagggacagtcctgctttcctggacaatgctcttagagtgagcaattaggctccaagcatactttgactctttgaatagccttctgatttgcaccattgcaaagtttgaaggttaaaatccttggcttcctccagaaggtgacaggggcacacactaaaactaattagcaaaaaattcaaagtggtggattgcagccatgtgctagggttttgaaatgcaaataaaaaaaatccttgcctacttcttccctggaaaggggggcagggtgggggtgcacctctgagattcctgcttggtcttagagttcccctgtctgagatcacatggcctccatgtggagacacatatgacatagcttgttcttctctcatcttcttaagaccaaactaggggaaatgtgtccaaattttctaaaatgttccctcagttctaagttgctgtacaggaagcagaagaacctttggatatgttgttgctgtctggaaacggctacaatataaactttatattaaaaatatgtatatctgacaatatccattttagagatattgaaatgtgaaacaagtctgtctgttatctagctgtgcatcgatctttatcagtttatcataaattacttgtgatctgtgttggtttaaatgacccccctaccccgctgctctcagttggtagaactggttggaaggattaggaggcgtggccttgttgaaggaggtgtgtcactgtggccaggctttgaggtttgcaccattcccagtatactctacactctgtctcctcatccttgatgatcaggatgtgtgccctcagctcttcctgctgttatcatagactcactcgaagactctgagactgtcagctcacttaaacattttcttttattactctccattttggtttctaagacaggatctcagtggattagctaaactggttgaccagtaagctactgggatcttcttgtctctgactcttagtgttggattacataatatgtgccactatgttccatttggcaatccaaattcaggccctcatgtttgcatagcaagccaccccaagccctggattgaatgtatgtatgtatgtatgtatgcatgcatgtatgtatgtatgtatgtatgtatgcatgtatgtatatatttatccatccatccattcatctatttatctatccatttatcatatatcctctttcttctgtttataattatccatttgtgtctttttttttaatcacctagctgttgatgaaatatcatggtttgaataaatgtgtctaaaggaccatatgacaaagacttgatttttttatccatggcactgaggcggcggggggggggggtgatagaatctctaagacatgggaactccagcccaagcacagatctagtcattcagggaagtaagttcttgactcagattagtgctgtggatatattccgaatgcaagtttttattgcatgatttagtctcttaaagcattctaaatttttttgccctatgagccgaggatcatcttgcctctcagctgtccaagatgtgtatgtacttactgctcaagaatcaataagattgtattgctgggattgaagcattggatagagatcagccggaagggacacatggaagaaaacttagtgggtagctatgccagctctgtagcaaattcttttctgctactttggagctgggaagtcccaggtgaattccttaacctctctgagtcggcttcctcaaccataaaatgagctaaatgagttctcaacttcatctctatagttgctgtgactgattgtattttttttttaatgtatttctgaattcagatttactgaattctttaaggaaggcaacatacctatcacatccagtaaataacattccagccagggctggatggtgctctcaaatcaagtacacctgtattttgaagcaagaagcgtgaacatgctgcgttgttctacacatgtgtagttcctgcatttaggaggcatttaggaggatggtaaagttgagattaacctgcaggatgacaccctagattagaaaaaatttaaataaataaatatttttaagtagatcatgggtataaatgaaatctttgcagcaaatagatttttatcaaactttaaaaagaaatctttgacgtctaagcccttggggatttggagttcttagaatggggccagacttctgcatctgactcctgggacagcttcatggcttgtgtgtaggtaaaatgctcactgaccacactctgtagctcatggtagaatgctcagtcttatcccaatacaattgtaaatgttttcaaattatccccactgagtggagctgagtggagctttcccagagcctgatggtcttggccagactcttatgtttgcaaccagaactcctagaccctaagtttctcttcccacagccccgtggacctggctgtcctggcacacggctcccacaagccaagcgctatgttttggctggcttttagttgttctagtagagaaggaaggagctaaatcagaaggttgccttcccgtcccacccctaggtgaaatcatcctttctgctgatcttttctttttcatggttgtaaaatagggagaaaattgagaacaatagcaacaaccaaaagagcattttcctcaaggcgagcatatgtgtgacactccattaacgctaagtgacatcttcttccatctcgcaggaatcaacacagtattcacgttaaccagtcatcgacggagccacaagcggatgatgtcctgtcactttccatcctatcagtcattttcgggcaagtgatgtgtctgtgatttccacttggacacagtcagtcagatgtttttagcacctcagtcatttcccaagtgctcagtggatcttctgaggctcagagcagaagccaaacaggatccacagaagcagaacccaagtgcctggctctttaggctttcaatggacataaagggtggggacttgaggcactgggaaggccctatctggggactggcctctaaatcccaggctaggagatctcagcagggctcatatactctctgagccttgacttacttccttgtacataagaagtaacagtgagttgtgtgtcaccaggatgctctagagaatgaagaattggtataagcaatttcccttcactcaacctttgatcaccacaatgggctcatttgtgtaactcacagttatgacatgggagcttcttggttgtcccaaccctccccaggacatgttcatttgtgagttcatttgcaatattgcttgtgttcactcccacattcatgtctccatccatctcttcatccatccttccatgtgtccatctgtctctccgtcagagccctgtgtgatagctctgagattggaattagggatacaaaggcaaagcaaacaaggatcgactttgccccaaaggagctccgagagaaagggacaagaccacaggtgggaatcctcagtcaggagtgggcaccatacagtggggaacctgagaggaaagagcccagttccttcagggttgtccatagatggaagagatgccctaacaccagaacagcaagctgaaagggggagggtagagcaagccaaaggagtagcatgtgccagctttgatgttcaaaaatacacagtccggtagagagcctgaagggacctttgtcttggctgataaagtatataaggaacaaactggggccaggtgtccagcatctatgagcacagcctgagaattgggttttgtcttaatgcctgggattggcttgtcatctactgatggaagggttcagacaggagcttgtaagtcttggtttgaggctttaaagttcttcatgacatctggaagggactggtcttagatgatataagactggaggggttttaaatgacaacctaggaaggagcagggaatacaaatgccataaaggtgtttggaggcctgtgggttagatccccagggttggtcttaacaagtcattacagatttagtggcttaaaacagtgtaaattgttctcttagagctctggaggttaaaatctgaagtcaaggtgtcagctcgtcccttgaaggctctaggagacatctgttccttgtcctctcaggttccggtgactgtcagctaagttcgagccttgtgggtcttgaacttcacatggcctttttatgtcgagatccctgggccttctcttgtgtttctaccctcccctgggggtgggggtggggaaccataaaccaagacaagctaatctcaaaacctttaagttgttatatctacaaaaaccccttttccaagtacagctagattggcagctttgaaatcaggaagagtcctagctttgaggaactatctatctgtggatctatcacaggggtgggcagctccagctctcagtaggtttctaagaagttgtagaggaaaggctagccctctgtacctgtgccactgcagtcccctgtgagcatggcctgctgacgggtgctgtgtcctctccgtaatccttttgcttctctaagaagtgggtgttgcaacaaaacataagatggaagtgaaatcaaaggaaatctttaaggagctttaaaggatggttgcttgtagagaatcccattttctctgatggtgccataggtataccatgatagtagaatatattcctgcaaggtgattcttcagccttaccaccttgccctgctggatgatcaaatgccctgagctgcagtcttgattgcttttgcctggcttccacacagctgctcttagttatattcatagtcagctctatttttatgtggcaaccattatcctgagtgaagatgctccccaaatcgcactgtctcattcactcagtcagagttcagggagcactggatccaagtgggtggtgccttctgcagcagacacagggacaccataaacaaagccccggtgctttgggagtagggagctacattgattgtgatgattacataatgggggtcagagggagcagagaagacaaacattcccagtaaagcacaggtagatatagccagagagaatgagaagtgttagccagcttcactggatggaaactatactggctgtaatctgccattctgacactaaaccagacaaactaaaaaaacggtgcctggttgtgttagtttcctctcttgttgctgtgacaaaatactgcaacttaagggagaaagactttattttagctcatagttcaaagcatgacagagggaacaccaaggtagcagctggtcatctcacagccacaatcagaaatcagagaagggtgagggcaagctagcattcatcttgcttgccccttttatatagcccagtaccctgcacagtaggcaggtgttcatccccaatgatgataaccttcataagcatgcctagaggcccatctcctaggtggctatggatcctgtcaggttgcaaattaacattaccatcacagatacccaatactggtggtgggaatgggaactgtatatatttcaggagtacagttttctataaatagtctgaaaccctccccccaagtaaatttgtattatccataggtcccccacttttttgtagtcttcccaaacatgcattctccttcatactgttgtatatttccatcatgatggttgactcatggattagaatgttgtttgtttgtgatgggggtcttactatgtagccctggctggcttagaactcttgatgtagaccaggttggccttgaatttggggtgaacctctgacctctgctttcaaaattctgagattgtaagtatatgccactgccttctttttattgtttggttgattgtagtatgctaggtcctgctgtacctgcctgctggacttactgtctaagttggagaatgtctataaggtaattcataggagagagaaagagatttcaagagccaggggctgcagaggacagctggaaaacagtatttcctggacatgataaggtatatatataagctcagagcagctgagacagtacacacgcacacacgcgtacacacacacacacacacacacacacacacacaccccatcctgcatccagtcttagggtttcaattgctgtaaagaatcaccatgaccaaggcaactcttataaaggaaaacatttactcggggctggcttacaggttcagaggttcagtccattaccatcaaggcagaaagcatggcagcacacaagcaagcttggtgctggagaaggacccgagggtcctacatcttgttccaaaggcagacagaagaagatggccttccaggcagttaagaggaaggtctctcaaatcccaccctcacagtgacacatttcctccaacaaggccacacctcctaatagtgccactccctgggccaagcatattcaaaccatgacgagggcacaaggtcaaaccagccaagatcctactaagattgtggctgttggggatggtgtgctggaagagttcatttttttcagggattcagacactgtctgggttatccaggctctagaagacatctctacattcactttcatatcttcctaaagtctctctctgtctctgtctctctgtctctgtctctctctccctccaccccctctgtgtgtgtgttaggggttaaaaacataatcaaaccatcgcaaatcaagtaccatctaccatatagctatgctacagatggaaacaactgcatacatacagtgctaagtggactcagtgtgcttgcaaaaattaacacatatgaaattctcaaaaagaaagaagaatgcaccccataaaaaccactaagctgttaaaggctaggctcacaacccaaaataaaaactattaagttcatgtaaaattgtaatttcatttagtttatttatattattatttatataatatgtgtatttattatattttatgtactttatttttaaatcaattttatttttcatttattttactatatttttattcaattgatttgtggctcaggcgattgaatctagggtcatatacgctaagcaagggctctgctgctgagctttatctcatatttgttttgagacagattttcatagctagcccaggctagccataaattcactattctgactctgcctcctggtgttgaaattacaggatcacaccagcatgccctgcttcaaatttgtcttaaagtaaattaataaaaactcaaaaccatggcctgctaatttttgtatgactttttaaaagttaagtgtgctcttgaagttgtttccatctataatatagctatcagatactttatttttggtgatttgactatggctcccacacacacactttatggagataggaaagtgatacgcatccagtaatggctgcacttgaatctttgagttttgatgctttcctggctatcagtgtataaccctgagatactgtctgaggatgctgggcacctgcagtgaacaacgatccatgagagccaggctgccatgaggagaagcacctgatgtgccatacacgctgtgtggcggactggggacttctgtggattagatgtgttcaaaggatttctattttactcttctacctgtggattagagtccagagggcacctgcaggcaggagtgaacacacctcctaggtacattcacgttaaaacaaagccttggactcgggatttgtgggtaaggggaaacatagagacagatcattaaaggaatgcttccaaacgtggatgttggccagaaagctggggaaggtcagaagctcaaaggccttgagctaccagagtcctcaacgagtcatttatatgtcttcttcctcatgtgacgatccaggcttttttttttttcccagaataccctgtcccttacatgtagtctcagtggggaagcttgcctagtctttttggcaactggcttcttttgtatactaatcttgagtctctctctaccctactctgctgcatgttataagagtctcatcttaagaactataaccctactgtaagcgggagagcctctgatgcatggaatcccattgtacaattcttctttgttctaccttcagaagtacggtgctgcccacttgcaacaggcattagtgggctactcaagccaccaacagcatcatgctgttccctggagggatgttcacaggatctcctctgtctgtggagaggtgtccatttgcagtcttggtgtgtgtttatttaaggtgtgaatttgtgtgtgcagttggaatttcagaccagcagcttccccacttgtggattcagctaactgcagatgggagatattttcaacgaatagcacagccgactgaacaagtccgggctcctttctcttaccattgtcccctaaacaatacagtctgacatggtttgcagagcatttgcattgtgtgagaccttttttttctctaggattgatttaaagcaggaggagatatgaattaattcctaaatatccttatatttctgacgtaaaatacacatgaccatgtcctacttttttatatatggtatgacttgattcttagcctttcatgcatggctgtgagtggctatgttcatgagtgcagtacccatggaagccagaagagggcaatgaatcccctggagctggagtcacaggcagttgtgagtcacctgatgtggatgctgggaatggtcttctagcttctctggaatagtagtattcactcctgagccatctttctagcccagtacaaatctttgtaaataaataacactggagttgcaattaacaatttacctttgacctcacgattggacaatataacttatctaactatttaaaattctctgttaaactttatgtgtactgaccttcttactgtcatctaaaaacacactcaagagccgggtgtgttggcactcagggaggacactgagtttaaagccagcctgggttataacataagaacttgtctcaaaaacaaaacgagaggcaaaatacatttaaaccctcaaatcacagaaaaggaaatcctctacaaggatttgacacaaatcagttattgattgcatcaggcctggcttttctcgtttatgtgttcccgttatctgtgctgcagtaggcagtagggaggcgtgttccatcctagcactgtggctggtgctctggatttagttaggttccggcactttgctttgcctatctcagagcagcagagctgtttgctgtagaaaagatcctggtagttaaggtttccttgtgacttttacctgttatcaacatgagatggctttccctacactgctcaatagtctgtctttggattcccctttgatattggatactgagagacctgcttttttggttttttggtttgtttttttttttttttttgttttgttttttgttttgttttgttttttttctggacatttttcttttcaacttgctcatttttttttcccaaacttaacccatttgtaacctaattgcaaaagattgaatctcacggaaaatacctggatacactccaatcttgatttaatttctgtgtctatgtccttcactaggcttcactagggaagtaacctgagggacttacatgagacagcatgactgttctgtgctgactgagggccaccatctttacttcctcctttttattttgtgcctttttttttttttttttttttttttttgtcttaaatttgtcttcatactcactttccttctggttcagtggctggccactgacagtcttttggggggcaacaggctgtcactggctgtcaccatcttaatgattgcaatactaatgagaggagtgattcccagcagtaactacagccaaagctgaaaaggatggccatccgggccttatagaaactcttcttaaccagacatagtttggctattgcatgcttataatcttagtacacaaaaggcagaggcaggaggattgtgagttcaaggccagcctgggctacttgggaagacccaaatgaaaaagaaacaatcgaaaaacaaacaaaataaagcctccaaatgaaataaaggttctgccagtccttgttttctgattatgcaaaatggaaacctgcctttcattttgctcttgagtacatttagtggccttgacacatttaaatttcagctttccctacagcttatttctaattgttatccatgtcttaaggtaatctttcttttctagatttcgatggtgtagttgggaatttttacacacatttctgatttaatcattattagttaacattataagatgagatatcatttttaaagaaccactggttgcgtttagagtctgtttacaactgtctgttaatcacttttaaagaaaattctacacttagctcattgagctcccactttcccaattcttgaaagcataactgcactttatgtctcaaaaatgactccgcttggcattgctttcagtgcttgacagagggagagatgcagggttgcatttgcatctgtaaatatttctcagcatcttccaaacatgagcagaaatgctttaagcctggaggtaattatcactaacccttgtagcctggtgatgtctagaagtctgaggcgagtcatttactcagataaatatcttgtttttcttctttgaatcttggaagaaatgtgatgcagattagtaggaacttcatatagtttattaaaaatattctcccaatttttaaaaaggatttatctgtatccatataccaacttctcatttctgattcttcggtctggtcattctgttatcctgggctttctctcctactagtatctgtagtaataagttttcataatcaaccaaaggttctgtgcattttgcttttgtatgtgtccatgtacatagtaatggacttcataaagacatatgtgtcatggactttggccattatcccccacctcctgtgtccctcccatgattcctgttccttcccctagatagtcctgctaatttctactttcttgtctctcatatatatatatatatatatatgcatatgcatgagtctatatctataagggtttgcaaatgaaagaaaatatggtataattttgtctttctttatggttgaacacagctccattgtgtagatggaccacattatcttggcttctgttctccgacagaagactgattctctaccttggctgttgtgagtagttcagcaatggacacggatgtgtagcatctctgtggtgttgacttagagaccttccagcatacacttaaagatacagctggagctcatgggaggtctacctttagctcgtctgaagaaactccatactggtttccatgatggtgggactaatttacatttctcccatcagtatataagtgttcttctgttttctgtgtaccttcttcactattagttgttatttatgttttaattggatgagatagaatccaatggtattttaatttgcattttcctggatggctaaagttgctgaagttttacatatttatttttgaccattctcattctatcttttgataactgtttattcatttagtttgcctattgatgaattgattgtcctgtttggtttccttgtagtttttaaagttatctatgtattctagatgctagaatctgtagtgttcaagatcaggaactcagctaagcacagaaaagtatcaccctgtaaccaggcatgagatagtgatttagagatctactgtgtcttttcctcttaatgaagcatccatgttagtttcctttgctgctggaacaaagaataacaatttcagtgacccaagcgggcaccaattaattattttgtagcaccagaggcatcagcagctctgagcttcttgtggaatctttcagggagcatctttttcttcctccttttccagctcccagaggatgcctgcatggggtacacagagtatcacatcctgcccactgctgcttccattgaccccatatttactacagggaaccttgtgatgacattgggctcaccaatgtccaggaatatctccttatctcgagagcatccatcgtcccagttgcatattcccctctgtcctgtagggtggcatgttctcaggtttagagattcagatttgggtgtgtctgtcgatccttatttagctgagtacaatgtctaccgtggaaggctcaggatctcctcatctacactctacccatgagagccagtagattttgtccctcctcgttcctcacttctgtcccaaaggcacacatttccaggatttgcttcctcccttatgaagaatcttttgtgtggatggatgttattagctatttattttattctgagacagtcattcctcgttctgactgaatgtaactatgctttccgttcaatggacttacatccatatccacctagcatctgattgcatacactaattaaaatagtcagcactcagagcactgggaccatactatgtagctggactttgaagggtaggtaaaatatgattatatctccctagagaatcatctctacagtgatctctctcaccatcttctttcttttatttctgggaaattttgttcaccaatcattgcttccatagtccatgaatcggctctgaatgaatattaaaaatattagagttctctttttgaccactgaataccaacattttcctttaattgcctatctttggagtctttcttagcttttaaaaccagatcttgttttatctgtttatctgtttttaaaaaagaagtgcctttttcatggaaaccaagtttccttgaatttccgtagaacacaaagcagatcatctgaaatttaatggcgtttcatgcagggaatcattttcttagaaaagtaaatttctctttgttctttttattttcattttttttttttagtttaaaaagtgtatcatcctaggccctgtgtttgataaactttttattttttacgatttataaatggatatggctctctctctctccttgagtgttctctgacaagtaaatggattatttgggtgctttttatcctctgctctcctgttacttttgacatttcttgtcataggtacagctgcagcttattcagtaaagcaggctgtgagtgtgtgcagtgtgtgcagtgtgagcagtgtgtaccaggctgtgagtgtgtgcactgtgtctgaggctgtgagtgggggttgtagtgtgtcccagggtgtgagtgtgtgtagtgtgtccaggctgtgagggtgtacacgcttgtgaatgcatgttacagtgatctaaccctggtgggagaaatgccaacagattcatatgtttattccttctaaaattctagtcccccaaactaagaggtgtggtcataatactatccatggctgtacccacatgaattaattcttttatcaaaggaggggctcaggggactaggtttggtccttctatccctcgtccagcatgtgaggctgcagcaggaagataccacattggaagcggaggacacactctctctagacactgacttgctcactgcctcgatcttggacttgcgagcttcagacctgacagtagtaagtaaaatattatgaatgatgctgatccccattgagcttcaaatgaatgggactcaaactacgatttatttattaggctttgtgcatttactgggggctgatccctaatctcctcctctaaccgtacactggctactcccccaactgtgctccccaaatacttgctgtttgattccttctggattatttctgctccagcagtcaggtgtcctggggaggcatttcacttgggtacatgctgctggcccatcatgactactgnnnnnnnnnnnnnnnnnnnnccgtatccctctccccctccccttcccctccctcctcacttctctcctgggtcctacctgtgacccccatcctggtaactcaacccctacctctctctatctacccactccagtaattggctgttgccagttttatttaacagtagttttaagttggggagtgggtttatatagcatcaattggtatatgtgaggatctgcttgttggtggcaactggatcttggtggccagtatttagcatttgaatacatagcagcaccagaccaaccctcaacagcaatatatttcatattatttataaatcatttaaggtactttgttactgcattaggttgtgtggtagtttgaaagaaaatggcccccataggcccatagggcgtggcactatgaataggtatgtccttattaaaggacgtgtatctcagtctcttcctgctgcctgtggatccagatgtagaactctcacctcattctccagcaccatgtctacctgcatgctatcatgcttctcactatgataataatagactaagcccctataggataagccagcccccaattaaatgctttcctctataatagttgctgtggtcttggtgtctcttcacagcaatagaaaccccaactaagacaggtagtggatcagtctcataaattatccagtgtaaagcacagatgggaaatgtaactgattgtcatcttctaattgaagttcaaatatgcgtacttggagaatgttcaggagctggggacttagccttcttagcattgttagcagtgtgcagtggttcttctagatgaaccctggtccgtgcaaggcagtgcttgcctttctatcatgtctccatgacacacacaattggaaggaggacagatttattttcactcctagtttcgggggttcagtgaatggttacttgggcagaacgtcgtgctgattataagcacatggtagaggagagctgttgatgtcacagcacagaaaggaacaaagaggcagttagggataaaatgaccgattcttggtgacaccttcctctagccaaatgtctatagtgtccctaaatagtactgcccactttggcccaagtatttgtgagggacacagatctaaaacataacagtcagcgaagggagatctgcccctgcgaagggattaggctcttgggagaggaaattcatcagtttcaagccactggaggacagagcttgccctggtggcctgggggtggggatgggaggtgataatatattctcatgtgctggtaacactctgttctgtgtgcattgctcctcggtgtaatcattaataaaagtccttttctatctccagagtgtcccagtgtggatgattcattgtgtgttccttagtaaaggggtgggaggaggtgccagctgcgaggtgcaggcaagacaaatgtttgagcacagtgttcagtgttgttaggaggttactcagctgctgtctgcaggagagcgggctgaggttggaccagacacgttttatgtattggttttcttttctcctcctccttgctctgctctccacctcttcaccaccctaccctctcacgattctcatttggatgccatctcaaaggatgtcatggaatttgtatgtgagacacggagcttgcttgcagctcttaactcttcaactcctttttggccccttgcttgactgaaggcaataaatggggtgtcatttaagagagtgtgatgcacagatcataagtcttaggccaaaagtataaaatatcaattgattaaagagtaattaatgaaaacctaattaaagctgacgttctgtgcatggcactcctggaatcctgggacagtctcaattgctaactttcctcagagatttccatgtataattgagaggtattaggctctaatggatgggattaatatgaaatttaattaatgaaaaaggaaattaagtctgagttttgtttaaagaaatttccagagatggatacgtcacagtggaacagtaggtgctaggggttcattaatgaaaatttttacgagtgacaggatgtcgcttatcgaaatgacacctcctttttcacggcctccttcatcctgcgtcatttgtctccattaggcagtccgtgatgtcaactcaggttgtgagaaattagaaggaatgttagatggagagagtcagaagtttgcctccattcacgaacagagaaaggacgttccaccatccttctcatggaaattcccaggatgggaaaggataatcaaagatttgtcttcttagttcttaaaaagaaattgagcagtgtgaagtcaacatagagtattatattaaaaacaaatttacttttcttacagttgtataagaaatcaacttcattttctttgcaggggccctgatcgtcccagggttgatgagcaaggtagcatctacaaggcttctgatattgtcggctcactggccatatgatcctatggaccacaaatgtgacctttcacagtctttattgttctctttcattgatctgtagttaatcacttctgggtttcgatttcttcccatgaaatgagttggggagtttaggcatgtgtgtttagggaggtcacaatgccattctagatgtctctgaaattcattgttgggaggagacctcattataaatatgcacatttccatagctgactctttctgtggctgtgtcttgagcactgggacgtagacagtcactaaaataatcactgttgtgtgttcggtccacgatcttgggcagtttggaaggtcttggagttaggtgatgcagataaacattgctctaaaacaaacattgttttcatgggtggtttaagcataggtaccttggctattctaaatagatacaaagtcaaatgtctctggctcagaatgaaggaccagtacaccagactcatagaggtaggtatcctgatcatagcttatttgtcattttgccactagctctttgttcaactataaccttagcaataaacatctattttggacatttcttggagaagaagacacgtttctgcagtctctatttgatctgccacagtgggagccacagtctagtgtgaaggtgccgagtacatactgtttggaaatgtgccatcttcaatgtattttccttccttccttaggttgcttctcttcttgtactttctgtgcccctcataataaagccagcaagaatattccggccttggtctctccgccttgtctcccatgctaccactgtggttgtaggccaggaattacaggcatcttattttaggaagccccagcttcaatatttagtagatgagatgataactatatcctttcatcatgggaagaccactaatagaaaagacttgctattagaaaaaggtattagcattaaataatcattgtaatgcatttggtcaagttgggcagtttggaatatcctgggtatgaagttagatggtgcagacaaacattattctaaaaatctactttcatatcttgctttcgagacacccatgacagcaaaaagccaacatcagagacaggtgagggaatccatcccattgcaggcttttaaggaaaagcctctcagggttcaccttgttcaattccctctacgtttatgaacgtgaactaccaagccattcgtcacattgtggcctgtagggctgtggtcaggattaaccacattaatgtagcagagtgcttgaaacagtgtctggtatacagtaagagctcactaagaggcaatgatcatcatcaatatgagtgagaggacagccgctctgtgagtccctaagaagggcatagagttctcactatctcttacatgcacattgtgtacaattgcctttctcctcttctgtattctcatctttttctcctccctgcttctcttctttcttgctatcatttccttccccttcaatccaccctaccttgttattgggacttcatctatcatagtgtatcctcattatccatcattacacctgaaccagtgtatgaacttaagaacagcaggaatgggtaggcagttagttttagaatcatgttctggtgggtaaattgcctatcatctacccatctactattctttatcactgtcttccatttatccatctaccaacctacccgcctatatccatcaaaacatccacttatctgctagtcagtcttccttctccatctacccatagactcacacataattgattctaatacatgtatctgtccatccatgtactcccccacccacccatgcatctacccatttattcatccatacagccatgcatctattcattaagcatttatccatctattcatgaatttatctacctccatttagttattaacacatacataattcataaccatccatccatccatccatccttgtacctatccatccatccccagctatcaatgcatcagtttgttcacacatacatagtttatttccatccatcaatccattcattcattcattcattcattcattcattcatctttcatcccctcatctatccaaccagttatttctcagagcaggaaaaaggcaaatcacatctggtgtcctcaggtcagattcaagtaagtactatgaaagtgatcttacatgtaagaaatacagcattatatctcattttaagagtggatcgagataaaagcagacacttcatatgttaacaagtgtcttaaattttgaacctgcatctaaaatattaagaggcaacctgtgcttttttctcattttctctgtagataatcataaatgcctctggtgatttgtatacaactctttgccttttagaatgctacctgcactttgaggtgcaagccagaagttgcaggcacatcagcattgataagcttggagactgcctccactttaggcggtcctggattactgagtggatttttatagtgttccgctaagggatgctgggtctttccatgtatctgccatcgcaaggccaccctgggacacaggagaccccagctctgcctctgaggttgggatttggtgctactcagcccatgacaagatgtaggggtttccatgttgctcctgtaaactcctgcctgtggtcatagctaacaaagtagctgggctagaagggaggcgattaccagtgcacgaacttcataaatatgagatgagacggctggggtggaaatgaaagttgagatgctcaaaaataaagcgtgaaagagccctgcccccgtctaagaacaggattgatctttgtacgctggcagaatgtacaatttcccttcgcttactacagagtctctgtttctatagaaaccaccaattttatagacagattggctctgtgagaaggcactgtgagttcagtttgaagccaagtgccatcagggcaaggcgctcccaaccccgaggagggggctttcttctgtgctcactaactagctctcgtggggatggttaatgatcaccaggctcggaacctgtcaggattattacaataacacttgcagggctgctttccttccatggacccctgaaaccactggtaggtctagagtccatggagtgctctcacagaggtcagaattagattcatttgttcatcagatacacgcagatgtcttatcatcaaacactatgcagagccctagaggctggaatatagtaatggaggaagacaggcagatgtgcagcttcatttcagctgatggagagatgtctttgtccatggccactttcaagagatagttctgatgtttagtggaggtcaagaatagtttggtaaagataggcaagaacaaagtggttcaggtacttttcgtgcataacaaaggaccccaaacttccttgcataggtagacttggtggcataggcctataatcccagcattcaggatagtgaatcaggaataccaggctagcccaggctattattgaggttatacatcaaaacaaagcaccaaagaaaacaaaaagctaatgacacagaccaacaatgcttttaggtgtttgcagatctggaccttgaagtagacaggcatggtggcaagagacttcactgttctatggttggggtttcagctgtggtgcatcaagggcaaaaaatgatgggcataattaataaacttacatagctaaaaccttggttgttcctatgccatgctggagggaatgagttcaagaacaacccttctatttatctggcagcacgaggttgggaggcctagaacagctggagactaagtgaaattattttctctctacatgacctctttcactgtctaagcttccttacatcctggcttcctctgagaaatctaacttcttccatgacaatgaacgctctgaggcttgtgacctggcttcagtattctagaccaccatggccactctattttatgggagagaactaatcactaaggaaggaatgccagaatgagtgtagggagagaaaatgggtgggtgctgcctctcagctaagaaatggtatacatgaccacaagggaaggaagtgatggcgtatgactttggagagtttccccattgagacatccagacccttttctgtatcagggtgcgactggagtggagaaaatggaatagaggagcatcataatagaattgtcatcaggagactgggcttaggacaacatgggtgatacctggtgctcatctcttcaggccagatacaggttcagagatacagtcccagcaatgtgtctgtgtggtaaataaaagcattcatgcataagtggatatatggtatgatggcagtgttgactcaggcctagtcacatgactggcaatgtcctttcagaggtgactggttatgtaggacacacttgaaactatcacagacaagatattgggttatttaactgaaatctattgagtccttcaagcataaccaaattccagggccctcaggaaataccgatctttggatctctctctcctctactcatttttcacttttgagagctgggttaaccccacaccccccaggtattctttcctgacagggaggcaagatgaacaaatgccctttccttggagctcagtgtgggaaaaggagagctcttctcttcagccaggcaaatcctggaccagatttgctttggcatatatcagatcacttaaagatccctgaataagtctctaggttgaaggcatggggtgggaatgggagagagctcggattgggcagccttcagttactactgtttatccttcaacccaattacctatccagtccagggggttgagaacttatgaacgatcagctttgggttactgtcatgctcaacacaggttggagtaaattctcctgaagatgtcccgggtgttcttagagacaaatgatccatgagatgatgtagagaagaacagacagactgccctgtcagggtgagactatggttaagctgatcaaagaggtgagcagggaagggtattgttgaattagaaaaggaagagatgtgggtagatctcagagagctgctgatgggtgtacaggaaaaggagacacgagaggcgtgtgctgagatagcggtgagcacagctctagctactggaaagtaaagagaagcagaggttggatttggccactgcacactggacaagtgtgtagaagtaacacacggagccccgtggatatgtccaactaatgtgagaataaaaataaataaaagatattgaagtggagttcttgggaaggaaaaccagcagccagaggaaagacgtacttccagctagagtactcgtcaggcatgatcacacttgcatccaatctcagctctcacttgggaggtagaggcagagggatcagaagttttgaggtcatcttcagctagatagcaagtttgaagccagcctaggagacatcagagtgtctcaggaagaaaagaaaaccaggggaggggctgtcagcattggaaatgtctttcagaagtgaagtgagtgaggttcactcatttgctccttcatgttcatgttcagtcagtgttctgagcatctactatgtgccctgggccatgtgctagggatatgagtgaacaacacagggacaatctccctgagttcatgggtttgaatcccagacaaggaagtggcaattagaggcactgacatacaattttagtgggaaaaggttttggaagttaggatgctcttgtgcactgtgtgaggagtgtgtggatggtgaggtggtgggaatggtatgtggattttgcctttgccacaagctctgttgtctcacagggagaagcagccagggctggaggcaaagggagggagactgattttgttttatattttcagttttagaaataagagtgtagcttactctttctgtgcacatgcttttctgtgccctcctgggttgtgatattctgtctagtctgctctccaagaagagatgtggctaagtcttctctgcctgaaggatggacgcacaggctggggcttgcaaggagagacactacatcagaatgttccctcattccctgcctgtagggagcaggaaggagccccatctctctttagtgtctcagcttccagggccaggggagtctgggtagcaaacacacacacacacacacacacatacacacacacacacacacacacacacatacatacacagccagatgcaaggaggatgcatagtctccctgctaaacaaataacccaaccttccagtgggtttgagtgtttgatatgcatcccttcctacctggtgtgccagctccttgtgaatggcaggctgggtggaaggcgggtagtgtgggggtgggggctggggtaatgtagataatcggcccctggataattgagagatgattgtaattaacctaatttaagaagtgaggctcaggatcccatgccttcagctctcaagcaattccaatctgaagtttctcacctgctaccccccaccccctcacctgatcctattagatgtttgaagctagagcccatcgattttgctcctcaggtgacatttggtagagtctggagacatttttgattgttatgataaggacatgtggcatctggtggatgaagatcagagatgctattgaacagggcaaagtccaggacatgagtgacccctctggacacatcagggctgagaagatggcaagaggaccagacttgaccctcagcacccatttgacaacggcaagagttggggctggaacgacggcctataagttaagagagctcatcccgaggaccccagttcagttcctagtaccaatattgggtgactagcagacatctttaattacagactctaggaatccaatgacaccctcttctggattctctggacaagtgtgttcacttacaggcacataaatatgcatagatatacacatacatgttttttaaaagtctttggacaaaatgcatagtaaaaacatgtttaaaagtcttaaaatggaagggcaggtgtgattgtgtgtacctatgaccccagtgctggggaggtagagataggagggtctctgcatcttgctggcttcctagtctagttaagtctgagacttcaaggttcagtaagagccactgccccaaactgtaaagcagagagctatggagaaaaacatctgtcacacacacacacatgtgtgcatgggggcctgcccaggtgtatacacagatgaatacacagactgatatagattaacagcaggggaggtggaacaccacagcagcagtgtgaaaaaagctgagacacaccctgtgaacaaatcctgctctttgaaggatggagggaacttatggtgttgaacaaaggaagatggggaggtttggggctacgtctgtactgtctccggatacacaggaacaaagtgaacagtatattccccctgaaaggtggtaagcattcagtacagggccaggttttttactctgaagccttggttgtattgattatcatatctcagggctcttgactagagagctgataacatttgggccctctgtcatgcctgtatcacccttgtctgatgcctcagagaggtcagaccacaatctgttctacctcaagctgaaatatggtgctattaaaaattttgaaggtgcttggctttggaggatttctaagctggttttcttcagcaaaaagaaccaggccctttaatattaacatctttcctttctctgtgagtactagcctctaagagcctgaagagttgggtactatttactaaggagtctgatgtaaatgagggctggtcactggctctgggcttccccaagtggctcattggctaagaactatccaaggaactgctacctcctacaggcaaagaaagtttgtcaccaaatagaatagagtcctgtggctttcagtgtatctgggtaggttgtccagtctgtcatcaactcaccccagcttagcatctatgaaaggcaagtggcctaaaccgaaatggacccagttaaccctgctggaaggtggaaactctcacagatgtgtccaacctgtggtccactttacagcatgcatcacagagtagctgtgactgtggccccacacatctgtagatgatgtaatggattcttccattatagcatcgtgataccatgattagtagagagaaacagactcaggagctcacacagtgtaggactgtacaggatttataaaatgtccagaaatgccaggtctgggcactgggtggtatgtgggtgatggtgtggggtatcataatggtagctgggagcagggtgtgtgggcagtgactggacggtcttcttaggaggtaatgaactttggaatgccacagaagtggtggccactttgcaaatgtataaagtgccattaaattgctcactattaaaaaaaatgcctattttatgttgtgtgaatgtcaccaccaaggaaaacttccctttggacagaatagtttagctggcctgactccaggttaccagacctagcctggagccttggcatgcagaaaggccactctctgagaagcaagaatgtggccgcctggtgggacatccctgctctgctgggtcctggcatcagggagcttggttagagcttcatccctgccctgtttcattggaagtgggaaatggagctgcacattagttcatgggaaattagtcccaggagacatagcagatcctcagcagatgctccattttcttggaaggagacatcctgtgagatgcccagtggagttgggagaggggagggtcccactagctgccattaagagaacagagtggccaatgtactgacattcaatggaactagacgctgacaggggtaaagaaaatgagcccatttcttgtgctacttccctagatgtctgtcccatgcaaggagcatgtggacactgttaaatcctgcatctgagatcagttctccaccagccttggtttggtggtaacaagcagctgccattcattaactgtatgacagtggaaaacctatttgacctccgtgatggcatatcctcagctgtgacaagctgatgataatgtttatcctataggaaactcagagatcagagtagattaaatctacccaatcatcttttagataggttgtaagtcacatagaagatatagcctgctttctattatacaaataaatgcacacaatatgtatgtatataccttatataaatacaaaatatattgatatttaatatatagctatttaaagtacagtttatatgcaatataaaaatattccatgatcatatatcataccatatgtacacacacacacacacacacacacacacacacatattatatatatatatatatatatatatatatatatattatgtatatatacatacagctcctgttacaacgtccagtaacaaaggtcaccaatggatattcatttcattgtagaatggctttatttgttcattcatgcatccattcgatgagtgagtgagtgagcgagagagatagtcagtcagtcagtgagtttaataagtttctggtaaatgccaggcatgggcaacagtgttctattctgtcacaaggcatatgtgtcagtgcacatcaaagacacatgcaattgtatatgatgactaaaaatgagcaagtgcttaagataaaacattactgagcatgggtagtctatatgggggttggaacaggcttctccaaggagggaggtaaactggaatccaatggaagagaagatgctgaccacatgaatcacagtgaccacatgagtctcagggagctttaccaaaggtgagcaagtccaatacaagagacaagagatgctagcaaaggtggctgtctaggaccagtggataccagcaaggaggagtagaggggtggggtgtgctcttcattggctgtctgaccagttattttgaggtgtttaatatttcattgttttcaaggaaggcaatgtaaggcagtggtgtgatgggattttcttttataggaaaggcaacactgttatgagggagagtggcttggggaccttcacaggtggacaagagagatcagttttcttggctgcctttgttgctatggcagcatcagtacttgatttcttgtctgcttttgaggacaggtgtcccaacagaagctccttgggtctctgcaggtctaagacctcactcacactgtgaaatcttccttcctctctctcacttggttctggtcttcacaacttagtatggggatggtaggtgggcctgtgagaatggatggtgttcctggaggggagaatctgcctcttccctacattcaccagagagtttaccctacgacaggagtgtcagtttatggccacacttctggagtaacatggcttaagtactttgcccagatggttcattcagttggttggtattacctgagtgaaatgttaggtagctgatggcttcagtcaatgtagaagatacagaagaaggaagcaggaaataccagcagacccaacctcgagtgtgtgtgtgtgtgtgtctgtgtgtccatgtgtctgtgtgcctgtgtctgtctgtctgtctgtgcttttcttctctgcaggatatacatgcttccaaagccctaaagccactggaaaggcaggatgctttaggagaggtggaccgcttcccaaggcagggcacctgggggaggttaaggaatggcagcagctcccaagagcagcactttttcaagatggtgtgtcttatatgcagagctccaagtgtttgggtctaagcttcctccagaaggctcagcccatcagcccatgcccatgcccaaagctggctttggatcaatggaggctgttccagtagtcaatggactctgatcttccctctcagagatgatacccacgaggtgtctgagttatcttgggacacctccagaaatgtggtattttcctatcgtcagcctttttggcagctagacaattcagcttcagcctgaatgttcctaagatggaaatcctggaggagagagaagatctgttgaagggcccttttccccttctcattatctaaacagatgattgaaatggatgccaaggaagaagctgtaaatggtaactagtcgggggccattctctgaagagtggaagtgctactcaaatgtgtgtgtgccaaggctctgccgcagtattgaacatgaagttaatgttgacctttcagttattcaacaagtatttatggaaccctgacaaaaatagttaataagccaagcatagtatcccatgcctttaattccagtacccaggaggcaatggcaggcaaatctctgttagtttgaggccaatctgatatacatagagagttccaggccagtcagggctacgtagtgagactttgtttcaaagaaaaaatgttaatagtaagagtttcctaatggacatttcttttatgttgagggattcccaaagaaacaagatgtgttagttatcggaaattatctgttaacttgaagaagttggtatcatcattgtgcctatttgggtataatagtgggttggaagagttggccaccatcctgaagtcatttaggcacagctattggggataaaatttgagtttatagcatctcaattcagaaccagttttcctgtccctcatgggtgctcactgtgatggttaatcctgtcactgaaatttaggatcatctggaagagaaacctaggagtctgcctgtgtgcatgtttctagacaggcttaatctaggatgaacagctgaccatgaaagtgagccatggacatctctttctgcttcttgactgtagacactagtgaacagctaccccacgttcctcctggtgtgcctttgtctccacaatggactgtcccttcatactgtgagtcaaaacagccccttccattgtaaagttgcatttatcagatactcctgcaaagcagggggaaggtaagtgttatactccttcagtgttgagtcctctgctcagtggcagggacatgagagagaatggagtctttgattgtctactctaagtcatacaactgtaaaacttcaaagaccattaaaggggtgtagggatttccatcctgtacttttggatggagaaggattccctagatgaaaattaagcagaatcatatctcatctaaaaatatcactaaatcactaaaaattattgttggttggacatgtccttctctggaagctatagttgtgttagagagatagatgatttgtctctctcgtcttgaccattagatgccccatcctctgcttgaccactgtattccttcctatccagcatgatcctgccatgcccattcccatttgtaaaatgtctttgggccaagacatctttggagtcagaatgtattcatctggtttctcagaatattgcttcctcaagatgatatacttcattttaaccctgatcctcatggtatagggactctacagtctaaatagtcctcctatagaactttgcttttctctctaactcatgcagtgaattgtgtttttctgggtttggtgagaggtgtgattacttggccataaaatgcttaggaattgcctttgatatgacctctctgagaacatatgtgaggctcctggaggtaatgctagttaaacatgtgatgaccagtatcagtaatgtagcttctacaaccattacacacaatgaatgctacacggaatacatgcatcaactttagcatggttttctatttttttttttctctactagttcttctgtaactcaaggagtccatggctgaccaggtcctataagagaaacatgtaaagttcaagtattatctttctccttcagtgtatcatagaggcatcatttaagtgtgttttaggaagaatgactcatggcttagaaggactagagagtttaaacacaaagcatagacacaagctaggaagtcctagtgggtaactgggttaggagtcatgggaacaggagggaggaatagatgtgagtggtttgttgagttagtgagttggctaatactcactagagagagaaagagacacagagagacagagacaggcagtgagagaggggggaggggagtgagttctggataagggaataccttttatacaaaagtaccaaagggagtggaagaagattggtactgatatttgcacctgctgtggagtaggtcctaaatacggagcctttcatctgatgacatctgccattcttaatattgactttaaagtctttggttaaacctcttcatttactgatgaaggagctgaaggtctgagagactatgcttctttcaacagagtgggctatgaagctctttattgaactattggtaagactacagctcatgaacactaatggtatatgccaaagccaaggtggaccctcccaacagaatgtgaatcaggcttcatgggagtatagaagcacatactgacttttcattttctgaccatgtttgtggctttctaaactatcgtctagggggatacaggtgccattgtaattctcttgtatgcttgagccaattctgttctttcactcaagagcaagatgacacacgtctctacacatttcccatgtataatgcactgtggatgctctactatatgaacagtttcctgcccctctgtctgtttcctctctgctttccaagtccatcccatttatatggacccattctacatttttatattgcttttctggttatcccagcccatcagattttatctctcttctttgccttggttatagctatgtgaatacattcatttactcagtgagcttgagatctccttaagaacattaaaggctgctctctgaccattttatagtatctgctgtgtctggaatgatgcttcaggcccatagctggtatgatgaagcacataaaatgtaaactttagagggaaaggaaattggatgccagtcttgatttcaccattgtgtagataggtgatcttgggtaatttcagtgacttatgacatcagtatttttagcaatgagacaagagaaaaataaaggttatctttgggaagattttattttaaagactaagtcagataattacttgttaaaggcctggcaccatggctgatgatgagtagcactggtatatctccctactttgatatgaccttttcccagaacatatgctgggcccttggaggtgatactggttaaacacatgatgcccagtgtcactaatgtagctttcacaaccattacatacagtgaatgctatatagaatacataaactttagaatggttttctattttcatttttgctcccagtccttctgtaatcatcacggactccatggctgaccaggtcctataagtgagacctgtaaagttcaagtacttcctttctcctctgctgtatcatagaggcatcattcaaaggtgttttaggaagagaatgacagagttgtcacattgagaagagacaacttgctttatttacctttctccaccaagccaacgagtgctctatgagagtacaggcagctatgcagagctcatgtgcaataaaactgggtgaaggagggatgacctgaccccgtcccttgccactcaacattttattaacaccccttttccctcaaagccctgtttatacatagatcagattatttattaatgatctcgtttattcaagtatttgtttattacctccctctcttcctaaaattgaagccctttgaaagccaaaaccttgtctgattcattgccatggcctcgctcctagctcgaggacttactgcatggtagggatcaagtaaatgttggatgagtgaatgaaggaggagtcagtggatttcaatttggctaaacaaatattgccttagggctgaggatgggccggccggatatagttccataagacaaacactgatctcaagaagaaagagagaagaggagacagggaggagagacaaacagaaatggcctcaggtgggcaaagtgcacgcccagtaagcgtgaggatcagggtctggatcctagacacttacaggtgtcccacctggaatcccagtgcccagcaggcagagatgggtattccatttgataccttggctcacggaagtggccagctctgggctcaagggagagatactccctcaatatgtaatatgtaatatgtaatatggaatatggaaaatatcattcattatcaacatctggcctctccatgcacaggtatatgcacaccacacatatgcatgtaccaccacacatgtaaacatgcctacacatttgtacatgctcaatactgacatgcaagtgccaaaaaaattggagccttaatccttttggtttgtttgcttgtttctgagtcaaagttggtagccacgtggctgcggtggttggggtgatcagcagcctctgggattaaagcttgagacagagtcatattctgttttgcaattggcttctcccctctgtcactccagattagcctgggaggccactttgcctggcaggagaaattgacatcccattgaaattgatgaaatatttaagcatttctccgtcagagtgtgctgagcattggcatttgaggaaaactcctttaataagaggcctaacccatgcaaatgtgcccgcgtgtctcctttctccatggattgtacagaaaccagggagtacagtgaaggggccaagcgagttgacaaaagtgtctctggagatcaagtactaaatggttttttattgctctcctctccaggaagctcctgtttcagctggcagcagtaagtgcaggttagacctgtgaacttcttataaatgctacttgtaagcttaagaactttagtttttaattggtttcttttctttcctttctgttttttccccctaaactactaatgcaataggaagaacaaaacatttttataatttcttaagacacaggaactattgagagagagaacaaagggactattgaaacactatagacattcagaaaacccacaaacatgcataacccccttgcctcctttcattgcacaatggaaccctctctaatgagctttcgggggaggggaggcaggcttgaaacccccagcacaacccttgtggaatgaaaagtaggctgtaggaggaaaggaagggtttgtaatgacaggggaaatttggggaggcaggacttactgtcctggctgaactctttcttcttctctgaccctctcagattcttctctcatatgctgccagccattgaaagccttgcccaactgtgttactttaacagtcgggtggatagattttggcagagcacactatgacaaagaatcaccttcagtccccagctgtgatggttactgtgatggctacccttgatggttactcttgatggctaactcacttgcaatcaaaagacacaagagggagattggtaaagtacacctctgggtacttctgggagggtgtttccagatcatgaattagatcattagtgtgctgacccaatcaatggtttcattattgatggatctaactttgattggactattaggcaagagcgctgctggagaaagttggcctagctgtaggtagtagtcactgagctgggtctctcagaaggctttctcttggccttacccctttccagttactttttctgcttcctatcagcagtgacaggagcagctttgttctcccagtctcttcctgctgtgatgttcagccttacctcaggctcagaagccagagacgcaaatgcccataaactgacagtcctgacatggacagccaaaataaaccaaggattcaacacagctataaaaacaaaaccaaacaactaaaaccccaaacaaacaaacaagcaaaaaccactggctagtcaggagattgaaaaatgtgtgctttagtggaaaccctggctatctagctgtagactgcaggacactgctctccatttgcagatttttgagcttatgaaatctatttcatacccatatgaattatagttaactgttatgtatggtctgtcccacacacaagaggttcagccaacccatttgatcttctacctaaaaatgttcacctccaattttatatccacttcagtgtttctgatcggtggctatgtctgctcactaggttatattttgagccacttgaaacatcttcctcatcctccattttaaatgatataaaaaagcccttaacatattttagatcattatgagtcatgatcagactctgacttggaaattatgttttgacactcgttacttcaaggtgtttttgaactgggaacttctgcaaggctcactatcttcatgggcacagtgggagtaataaacagggtggaattatcaaaacttcagcaaggggtttgcagctcactgttcagtttggtgctggtagggagataacctttagcgataaatctttagccattgcagatgaccagtgagctaatgtttgtgtaaacacttttaccaagggtgaatcataaaatgtgattcagattttctctattctcttgttcctcctagcaacacatggagcttcaggagcaactctcaactccttgatgcttagaggaaaaagagagggagccaggggatggcagctacaggatcagttttggtgggtggtcatgcgggaggacattctaacaaccagccatgagtggcagcttcatgggatagtaagggcctgtcaatgaacatatgcaggcaatggtaactgtagtactagagttctcgatttaactcctggttatgagaattgtaatgcagagaaacaggcacacagggaaataacttccaggacacacttccaggaagtgtcacagcttcctaattgctagagttcctgggagccccatcccagatatatataaaacacctgaacactgtctgacacaaggcagatgtgtgctatgagctggttttaagtaatttgccttatgatagcagctttcttacttgcccaacaggatactgacttattatacagttgtgcactgtatagaataggaaaagctggtgaccctacttacacagtcagactgttgcttaagtgtgtgacttggcagcaatcatatacatgcgcagccacagcgaggcagcacaagtggaagcatgccaggcaggctgtgcctggcagatcactctgatgcagagcccagacccaagctgtgaggttctgatcctgtgctccggtctcttactttccaagctctgggttcccacacctgtttatcctcttctctcaacctccatttccaccgtgttagctgctgtgtctcaaacctgacatccttcccttatctctttccagtaattacattccatgatccaacccctgagcgaatccctggccatgcctccagaatatatggcgagtctatccatatctcttttccactatcccttgcagatgacgtcatcatcagcccttagctagaacctccaaggagagcccattcttcctacccttgtaccccatgagaatatttccagccaatactcagtggaagcatgacaagctgtaagatggtcgtcatactactcctctgtcacaggcactccagtggctctctgtctcattcagtgtcctgttataaatctctgggttgactattaccaactgcaagaagacgtctgcttaaccacaactgggagcaccacaagtctatagtgattgttcatccataggtgagccttctccaaacccaaggtccagcggtcattgcagaagaggagacagaaagaatgtacgaaccagatgatggggaggagagctgtgaactgctgctctttggacatggcatggctgtgtgtgtgtgtgtgtgtgtgtgtgtgtgtgtgtgtgcatatgaactatgcacagctgtggttacctgcacaaaatcaagccagttaaaaattccagcatgggtggagcaggagcttcctagatttatccttagcccaggagctattggtgggtgatgctgctgagggagggtgagcggtttcctttggggctttggctgctggccagttgtccatgctccagtgtatagcctcacatactatgcattgcatgcagtgggttaatcaagaggagaagaatggacgtgaacctggaaatgcatctatcaaaatagtccatgggtagaaaaggtgatgagattatcacacttacaaagaggcctccaaagactgagacttctgtcctgttagctgtctttcttgaaggcctcttcctcttaccttcagggctactcactgtgtaaagctaattggcatgctatgagatactctaaggcggtctataagtcaagggagccctttgggttattgttcagtatgaaccaaggccaaatcctaccagtctgtatgggctgcaccatgtgaggcaagcagaacctccccctggagagcctttggagaaaagtctgcagccctggttcacatctcagctgtggccttgtgagacactgaaatacaggccttgactatctatgcttatattcctgacagcagaaactctgaggtcataaatgcatattgtcttaactgctacattttgggaataacttgttacacagcagtatgtagctagtacacatctggcttttttctctttacctaatggaagctgttttcttttacgagacgagttaaattcttctgttttctctaattggcacatacattccttctgtcccctcccagcttcctgctctcctccctttcctctctctcctttcctcccacctatgggattctagacacgggtgtttgacatgactttaggatcagcaaactccctgggaccccgttagccatgccgtgctgaggcatgtaaattctcggcaccttctgacacttctcagggccaagccattggtgagacctgtttgattattccaatgcatgtcattgcccagagggccagttggtatttataggaagccgagagtttggcactgggggagaattcgttccagactggtgcacttgcattcagatagaatcatattctctgaaaaatggcacgggatgttgagctgattggaaattcagcacgattgtatggctcactgggcttgcattgtggctgagaaaaaccatcctgttgggttggggagatgacagtcacctctcctcagccggctgttgatagatgtttgaggacaggctgaagacgaggctgcattcttcttccaacttgaaatcaccgagttgcattttaaagtaaatcaacagagaagaagggcgcgctgacagaaacatcaccaaggctcggccccggtggcggcgtaagcaggtagacacaaaacagaaggctttgagataagtgttcagaaattcagagaggcaacttgtctgtcattcgtaatggctaaaatctttgaggaaaatatattcttatgtggatgggtttggaggaggcaagcaagcttaatcaatcattgagtaatcagtcgactggcaactattcaccattcccaccttgttcctggccttatcctaggggtaataaaagcacaatcaaataagatcttatctttctttttaaagagttcatgggaaaataggtttgaggcaaacataaatatacgtaaaattatactatgatatggtgagggggcaggctaggtgggagaacacttgaccccatctgtggagacaagggaagaacaatggagggttccctgagaaaacaaaccatgctggcaggtgccaagatcgagatctaggggagcagaggacgttctgggatggacagttggcttatgcaaaggcccagcagtatgaaccaacctgttggcattgaggaattaaaaatttcattaagattgatgtgtgctagacaagattatatgacgctaagagtattatgaaaggctggtctaagaggccttgtgggtcaggctaaagtgcagagtccatccctggggaagcagggagtacaagacaggcctaaagagcagtagctgatcaggtttgctgtggaggagaggttggaagagaaaagaagagaatgagacccatgaggttaaagaaaggggaaactattcccctcttcccacaccatgtaaactgtgggtcatttctctctctgggtttttaacatggtgcctgtttgcaggtagttagaagcatcccttgggggaggccatgtagctagaggcaatctgtttagaactaacctgagtgttcaggccaggtacctgatgttccttctctaagccacagttagaccccagccagaacatcgactagcagtttgtgagcagcaactgtcctggttggcaaagataaaggatgttctattctaaaaaagagggagttctgaggataccagcaacacattacagtgtccagccaaggttggagataggagttcgtcatataacattgccctctgagtttaacaggagtcattttcctcagaacatctgtgaccacttatttaggatctggcctgtttactgtcgacagtccccatcactgaaggggtatgaggtgactctaataccacctgatctcagccacttcctgccttgaataccccacccagctagccataagacattttgctctagcactgtaaaatgttaactgaaggggaggccccatctaagcagatgaagtctccatcactgttgggaagagaccttccagagtggctgtttggggtcatttgtgctcgtgtggtaaaccccttacccttctctgtaaacaagcctaatctactcgttggttccccaagccggattctggtggaatcctatgttggcttgttattggtgctttataggggtgggggtggggggtagacatttatgtctcactaagaggagagacaccctccatttctttgcatcattcatcccaaccagaccttctgatatcagtccatgccagcatttcaactcctttttctggacttggctccttgtccttctttgtctgagacacaccctggtcactttttgaaggctgagaccttttcctgcagcctccatgggagtcagatcctgactgagcacatgtcttatgagaggttttggctatttgattgcaacagctactcatccaaggctcctaagaggtttcttcccctctgaaacagtgaaccctgtaaagacttgtgcccacttcaagcctgagtctgacagccatggatgaaggagctagcactagccctaagcaggagttcccagacagcatgtggaaatgacaggacatgactaggacttttactctgtcatttcaaagcactgccaacccgataccagcagctcgcctggtaccctcttttcctgctgccaaccagctgtgtgttgtatttgggcatgctagctttctatttagatggaaaacatatcattcccttagcaaacatttgttgcgttcctatgctgggtcctctcatcagattgccagcagtgctctccctctctccgtatctctggctccagaagctgctctaaggagaacagcatctcatcttcattctgagcaggatgcagagtggtcgttttcctcatttgctcccaacaggttcttgtcctcgtctgagcccatgaggtgttcctccagctttcaggaagcagtgatgcccactggttggcattctctggtcttactcagttgcagctgctagagcaatagctgaagggtagctggctggaacaatatacttctgttttctcagactcccatgtccttgttctggctaatgtggtgtctggttttatgatgggctctttccctgttttgtagtcagctaccttctgctggggccccacattgcttttcccaccagtgggcatgtagaagggacatatctcctctacactctccttctcttttcttcctcctcctcttcttccttttcccctccctcttgatctcttccttcttttaacttttgttattgctgatgtacccatccatcctacttttcttcctctccttctatctttcttctcctcttcctctgctttctcacctttcacgttcagccaccactcctatgaagagcctacccttattcactcctcatttaaccttaattaccttctaaaggccaaactccaaatgtgatctcatggagagttacatcctcaacttgaaggcttaggggtagcagtggggagttacaagtcagttcaaaaccctgcttgtctccatgtctgactcctggtttctgattctggcctgagacttggtactctgaagatatcgttaaggatgtggatggtagtggccaaagtggagggcatcaggggaagtcgcttgtctcattcaaacagcttgactataggtatttcttgtcaagcttctatgcttgattgccaggcacaacagttatcctaggctgtcacacttgtttggcaggcgtatcatgcagatttattacaaggtaaattgggttgctattgtgcaagctttgtctcctagtagagaggggaagtcgtgaggggatttgcatcagggcacagagtagacagaggagccttgattggcatcattgtatggtaagagctctaaggagaagatcctcaaaagtactgtagagccaatgttcagagccatgtgctggtcttttcaggcaagatttccttatttatccataaaatgattcctgtcatatgacaaactctgtctcctttggtaagacgtcataaagtaagaaaagagtttagcccattttgttttaaatgcacatctgcattgacagggtgtagcccctcggctgctggtgttggcatcagaggggaaccagcaggcttgtgaggtggttttgatggaggccatgttgcttcctgggatcagatatattggggactataaaaactagggcccatcttcctcactgccaccaagcttctgggcttggtgtctccctctctgcttcattggaagggagtgtagagagatgatacttaaacttttccaagagacttccctgctgcactgagctctcggagcttagaggcaggcttcccaatctggggaccactttttttccagcctgcacaggcactaagctgaggatgctgaactcattatggccatgagttatactgttccaaaaagcacagtcaacagtagaggagaaatttctccatcatgaatcagaccattctaacatgtgtaatcaacattggaggagaaatttcaggtatttaccaaatggtttgctaacacattgtcatggcaactgctaatccttaaggagcctgtcttgagtggtttctttgacatatgcttgctagagctgaggacacttgtattccaacaagcatcaaatcaaatattatttttcagaatttatttaagaggaaaatttgcccatcattttggctctgagggatatcagaatcaggaaaaactttctctgacactggctcttagtcttgtcaggtccaaatgctgtctagctctacctagaataaagaataatttctttattctcctgtgttaggtatctttccatggctgtagtaaaatacctgagataagcatttatagagagaaaagggtcaatttgcctcacagtttttcaggttgcagatcataattgataggccctctttaaggtagtgaaccatgatgataatgaacgatggaaccaagatggttgttttgtggccagtgtggtgccttgaatgagattggcccccattggctcatatatttacatgcttagtacctagttggtaaactatttgagaggattagaaggataaggaggtgtggctttgttatagttagtatggccttattggaggagatgtgtcactagaggtggcctttgaggtttcaaaagcccatagctccctcacgctctctctctctctctctctctctttccctccctccctccctccttcctaccctccctcctgccctccctctctccctctctccctctctctcagcaagcctgcctgcctgtggattagcatgtaaacacattgtcatggcaactgaatgccttcatactccccaccataatgataatggactaagcctctgaaactgtaagcaagtccccagttaaatgcttttctttgtaagagccatggtgtctcttcacagtcatagaatagtgaccaagacagtcagaaaacaaaactagaggtaagaagggttagggtttcatattcccctgtgaaggtgcacccccattgacccaaggatcccccttgatctaagaatatctcatctgtcccacctccttacatttctgccaccttctgctaacactagttggggacacattaaacatctcatgcaggggtgtccagcctttgtatcccgagcatgagtctcaggacagttgtgaggagtgctgcccaacagatttgtagatgacaatgctatgttgaaattccagaagattgctcactgcaaatgtaaagtatggtgcctcttactacttttaactacacatatatttttaatttgagaagtggggaagtttctacataatacatacatttggtacaggaaaataaataagagctccgtgtaagaacattggtgattaatgtgctcgatttcggttttatcctttccttgctcatatttatgtatctgtgtgttttaaacacaattggaataattatttgcatgatagattatttcatatcctgctttattacttaatgtttgattataaacgtgtccccgcacttcagattatttagaagtctaaattattgataacagtatgcacttcaactgcacgtgtatatcacaactgtttagcctgtttcctattgtagttgaatacttttgaatttctttgaatgcttatgaattatgccataccaaatatccttgcatgtaagtggtaaaatatctttttagaagagacttactctgtcaagtgcttgggatgtttaaactgacatgcacatgcccagacttccttctggaaatttttgcagtgacacacacacacacacacacacacacacacacacacacacatatatatatatatatatatatatatatatatatatatcagaagccaaatcattaaccctcttgcctaaaggatgggtgaagatcaaaagagagcagatattctacgggtgttacacaacttaaattcattctctgggagaggtgtaaagagtgtctactcctccccctcaggttttcccaatcttgtctctgagtaaccaatgagtttattgggctggcttatagagcaatgggtgaagggtaatggggaggatcataggtgaccttagagcatccactttggaaggtctgctccaagtatggatgttgatccctatggctgtatagctagagactcttcctccagtccttcacagagaaccccaggctatgcataactagggagcactgcatacaactgattgggaggggtcagatgagggacccatgaccttccttgccacctctttctatgagggaatgtcaacagccaacaggactaactgtgatcatcctttgcacataggcaccagcagaatcctgaagatggtagagggtggcttagaggatcaccctgtacaaatgagtattttgttattttgttacttgtggcaaagccatgcaagcagtaatctgtggacagggtgctcggtgtgagaagaaccaaatggtatgtctgacaaggccagtccttgggggaagagggtgtatattgatggatgttcccattgcagtgacaaaattcctatcagagcaccttaaggaaggaggttgtaatggtcaataataattacccacttgataggaaggaattatttagcgtctggacatgcctgcgagggattatgttagttaactgggtgggaggacccatttggaagtaggtggcacccttccctgggctgagaaggctagctcaacaatagagtcatcacactgatttccagttgtgggtgagacatgaccggatgtttccggttcttgctgccctgacttccccaccatggtgaaccttgtactatgagctaaaacaagccctcctttgctctagttggttttgtgacacatttgtcaatgtaacagagtaagacttgtttattttggctcacagtttggacatgtagtccatcacaacatgaaagttacagagacaagaatctgagacagtttctcataatgactactggtactcagcttgctttttctttttttattcagtctgggatgccagcccaagaaatggtgttaccccattagggtgtgtcttgcaatctcacataatctaacctagatacttcttcatagacagtgttagaggtttggctcctaggtgatgctagatcttttccaattggcaaccagtaccaaccttcataggatgtctcctcctcctgtttggaagcgaaggaggccagggttctatgtggggaggcaccatctgtcctggtatagctgaagatatagaagatgtttctcaccagagaagaaaatctaggcagactgaaaactccaacatgtggaacataagagtcactggcacatgctgtctctcagctggctgaaggccattgctccaacacctccttcttttcctggatgaccctttcttagtcctctagataagtatactgtattctctgccttacacacccaaatcagcacaggagtatcattgcatagtcctgctgtcatctccccatgttgtcactctcacagacgtgtgtgccagatgcatgtggtgtctggcatgaggacagatgtgccccagggagtctgtcctgggcttgcagcatcctggcccattttgtccagcctgtagctcacagctgcaggtgcagggctccccagacagctgcagtcatccgagttctgtctgggctctgtcctctcatcccctccctctgtcctgcactgggcatctccaagggctgccttgctgggagcagctgttgattcggatttttcatcaggacttttataattaaaattcgaagctttcagacatttgcgttccattacactgaaggagcagctgttaaaatttgaggtagggaagcagaggtttcccggtgcgattagggttaggttaattaagtatgtagatgtatttccccttctctcagtctagctacaggattgagaaagcaatccccaccctctctgccctgccctagtttctatatgccaagtaccgtgtcattcagtactccttaggaggcttggaaactaactgtatgtgagggtcagatcctagcactggtctaaactgtctggtgaccttggaatagttacttttgtagaatgaagagagatgccacataaaggtagagtccagtccatgtatagaatagtctgtgttctttaaaggaatacacctgagagaatgaatatatgttaaagggggatttattcaattgacttgcaagacgcatccagccttgagtactccagcaatggctgtcataccggaaagacaaagaatgccatagtggcttagtccccaagtctggatgtcttagcaaacccaatctggtgctgaagctctggaagactcccagagagctactggttttcattctacattagcatccctaagaagttggttctaatattggtgaagggatgccacgggaacaggatgggtgaacttgtcagtgagtgcgaaggcaagcaatcaagaagcaagtttcctccttccatgttattttatatgggctgccagtgcaaagtgtggcccagatttgggatgggttttcctcttcaaatgatctggccaagagcatccctcatgggagtgcccagcggattgggttccagttgatctcagatgcagccaagttgacaaccaagattagccatctccatgtgcctaacttatgtttgcatttattactagaacatcattaatgctctcaacagattagcatcatacctgaattacaggggaggaagggagccctttcaggtcaaatcataggtgtatgtaggtgcttgcagtaggtgacgtgctggatgtggaaccttagtcagtctgcatccatcgctccattgtcccaccatgactggcttcctccttgttttctttccccaccctgatgctgcttccttcacacaggccttgccttttgttcttccccttaagtaggatggtgactttgatgctgggagtcaccaaaccctacgttagttccgtggcaagtgggacatccaaggagagaataaggtttcttatttgttggaccctcagcttttcctgtcttgtcttatcatagacatctaatagcaacgttattaataccctgtctgagcaccgtagtttctagggatactaagacattgaatctctctctctctctctctctctctcatacacacacacacacacacacacacacacacacacacacacacacacacttcatatctactaaatgttagtgtaaatggcactaacatatcacaagaggtccaagagagttttgctcagccagaacttctgcagaaagagttttgcctgctccaacacttcatggctggcagctttaggtttctattttggaaggtctctttgttctgcaaaacatgccacacctcctgtgattcttatgctgtggacatgaaactccagcactggatgtaccttgggggtactctaccagtgtgcatgcttggggcccatccctgaagtacagactcagagtctctagtgccaggcccaggaatctatctgcatgcaacaagttctaaggtaacttatataaccaataaagtgtgaggaccatggatgaagtcttgtgcacacagacttgaccatggatgaagtcttgtgcacacagacttgtcaaccaaagcccttttatgtccaaatctctgtttagtgccacacactcaccagaccttttttgagccaccttctctttgctgtgtcgtgaagttactacagctgttttaggggactgctctaaggctcagccatttccagctgtgatggtctgtgtacatttgagccattctgtgtaacctcagctctctttgccttggcaatgtcaaaatgatttcacttgtacttaagccctcagggcaaagagcttgcatgcttgtgtgggttttagcctactcgggccccattttgtctattttgcttctacatttgtacttttggaatcaagttgtttttgttcccagggggtctcaggtgcagccttggatgctggcaagcattgtattgcctgttcaccagaccgtggctacatctctgcttctattaccagggtagaagactgttttacatacaggtgccatggtcttcctttgctggctgtgtgtagcataatgtccagagatttctggacattcatgatgtagactgtaattggaaggagaaggaggaggaggagggagaggagggagaggaggaaggggagggagagggaaggggagggagtaatattaaaatgcaaatattgaagtggtcaggaaattcttatgtgagtctatatagtttattcagagtacccagtttagctggaagctgatgggatgctgataacatcagatgctctctaccaagacatggtaccctagacatccccacagtgtctgtgggaatgctgggattaattccagaggctcccaggtcttttgaattttatcgagtgaccctgttcagtcatctgactttcctaggctctagattttctcaaaggcagaatagcagtgataatggacctcttggggactattattcaggtgattgggaagatccatatgagaagtgtgttgtcacctaggtggtgccgtatgggcattgtgtcacctggcaagttctgtgcaggcatttcccactgtctggaagccttcggtcagttttcatccctgaggtcttacacatttaagagctttatgtcatttgattcagatattgcaaagccatgggcctcaaatccagctcgaggcacaaaaatgttctgttctgagtatctagtgttctttaaccaccatcacagcatgcctgtgatagggtctgtatttttcattttgttgagaatcctaaccctctgtatttcccagcctgtgactttgttcatttttattgcctatgaacagagatccctagtggtgacctttaatgttcttgatttcacttagcatctccaggtgctgtggtagaacatgctataggtaggaccggcccttccagtcatactttagatacatgagtgatatcagcagctatggttacagggcagaaaagacagttggggggctcccctgacactatggtggagtcctttctgtctacagaaatggactgtttgtcatttcacaaggtaggtaggcactggggattacaggggtggacacagatgcagcttaggatgggagaagtcttcctggagggaagcttgacggctcaactttacttccaagggtgaggattccataaggccagggtagtttgctcccatctacaatggtaagggctgaaggcattaagtgctgtagtgtttgaatggcctcagtgaagctatgcagggctttgatcctggcgtgcacagtggcagccagggagtcatcccgactctcacatgcaggctcctgcaggcaacagtcttctccttcaaggtgtgttactgcagaggactgcatggagcacccactgttgatacaaaggaaggctgagggaaccttccagggagactgagaccgtgagggaaggtacacaggagcaggctgggaagaagggaaaccgttacctttatgtatgaggcaagaagcaaggtgtttgttacacagctgtgtgggtatattagttaggtagagagaccgacctgagcttagtggaggtttataataaagacctgtcggttatggtccttgtatgggtattatcccatgggcttggatgcagtcctctagttgaatgtagagaagagaggactgagttctgagctcagtagaagagcccagtgatgggggctcagcagtgtgagctgtagactggaggaggaacaaggaaatagcatggcggaaacccctgggggtgggggtaggggtaccaactccagccacactgcccattgagtcagtgtggtagggactgagttctgaccttaggattcagccagaggtcacagatgaccttgaaaagaacaggtcactctcctgttttatctgagaacctggagagcaggtacgacggacaccaagggcacagaaacttcaggttggtccccttttttcccccttgttctcagaaatagcaaaaggataatagtataactgaccttgacacatctaaatcaacatccaatctgaaagaaaggaaggtaacaaaaccatgtttgaacaaatcttggataacagagatttaaaaaaaaattcttctaaacacccctgctctgtacaattgctggcttaatgttttgctgttcataaccctgcactccactttacttcattaatacgcatatagttttttctttcttttttaaattaaaagaaagaagaagaagaagaagaagaaggctgacctgaaagcctagttctagctcgtttggtaccctgttctcctgcttaccgctccatcacaggcgtttttctgtgctgtcttcttgccacggtaacctcagtagttaaaattcacaggatctcattagaacctgctcccaacctccatatttcctgcggagtctgaagctaatgaaggggatgaggaaaatgtctgtaaatattttgttgttttgcaaacacaggcactcttaaatccagtttaatgattgctcagtttaattaaaccctcttggtcttatttgttacccagttctctgcactgattagggcccggtctgaaaggagggactcagatgtgcagcgcagttgcagtcgcttctctctctctctctctctctctctctctctctctctctctctctctctctctctctctcttcctgagaatgcgaagggaaaaatttgaaagcaagactgtggatctgttctgtgtattcttccgaaccaacttgcacagtagccttttgtttggatgaggggccgcaaatctttcggatgtgtatgtctctctcacccctttgaaaatgcatcaagatatcgcttctagtttgtcacgttaaaatacacaacatggcaatacttggctatgccgcagaaccgtgtaaccctgtgacatttacatgtggaattgttcccttaccctaaaaaacaaaacaaacaaacaaacaaaactctcttctcttctttcctgttctcaacttccatctcgcttccctccccaccaactcttccccaggcagcaaattctccactttttgatactatggttttcccattgctaccattttatataaaaggaactatagggtgtgtggtactttgtgcccgacctggccatttagcctgctcctttcatgctttgaccatcgtgggcatcatgctggggactctttcatagttaggatctacaatacacttatgttttttcccccctgtttctgactcacctcattcaccttgttcaaaccaaaatcactatgaccatgataaccctagaatattgttgtgcacctagccctttctccatgctgcagccccaggctggccttgtgtgatgtcctagtcctaagctctgccacagcagaccagagtcctgtggagagaatggcctctgagatcaacacactgggaatcgcttattgtcaaaattaccctcggaaaatcctttaaggcttctgtgataaagtttgtttgtggcatgattcttaagcccaatgcagtgtataagatctgttgaacctgggttgggagatagcttagtctgtaaagcttgctgtacaggcttaaggatctgagttaaatacgaaggacccatgtagaaagccctgggtgtggtggcactctcttgtactcccagctctgcagagggcagaaacacgcagatccttgggcttgctgaccagccagtgtagcctatttgcttagctctaggccaatgagggactcggtgtcaaaataacaaagtagatagttcctgaggaatgatacataatgttgtcctttaacctccacaggcatgtgtatacacacacacacacacacacacacacgcacacacacagaaacatacagagcctattgagctagactaaaagaatgagtagaacaaaatcaacacacaatcagtggacactgacgatactcttcatagaatgggtgagtgggtgagtggggaagttccaaggccttcttgcttaactacagggatttgtcccattctgttttagttttaagtctttgactttaattcaaatggtatttttcagggggcagtagcaatctaatgagctaatatttgcaaaataaagcctacagttggcacctaatatattcagcaagatgtttcatggactggcatctactgcttgccagatccgaagcacatgtagctcgtttttttttgtttgtttacatttaagcggaagggcttgggccacctggccttcacatttcccaactgtcatctctggcggggcccacacattagcattatctcattctcatcctagaggcttggtcagctgcttatagctcaacgttccagttcaggggctaaggtccaagccctgatctcaggaagaaagaggaatttggggaaggaaaagcacggagcacccttgatctcaagaagagaaacctggggaaggaaaagcatggggcacccttgatctcaagaaggaaaagaaagctggggaaggaaaagcttggggcacatctatttcacctgctttccttgctgctgttagctgtcctgatagagacagtccctttgtcttcccactgccatccctttgtggtttccttgattgagacccagccctgaaaagctggacaggtgctttcacagcctgtaaagagagcagagctccaggagtgtttggcgttgagtttcaaggcatagatataaacttttagtgctgcactgtttcctggtggcaggtcttagccggagacggaggagtggatatctttccctgggcaaggtctgttttatgtttagggagttatatggatggtgcagcttgtcgtagaggggccttttcctgcagttatgggtgggagggaagctgcagagagcagtggactagtttaagcatttagggcagctcaatttagcatctttcctttagagtcctaactgatgaaagataaacgggtgtataagtgccttccacctatatatgtgctctccatcctgatagtgtaggtcaggcctcgtaaatggtatggcagtccagagtggtggctgggactttgccccgcttcatcctgaactgcttatcagagtaaaaattataactgtgcacagcagcaagaaaacacgttaggaagcagacactatgaaagtaggaagagtttagaatgaggagagccgtgtggttggggtgtgttggtttgtatctgaaatcccctccatatgatgatgcttcgaggtttgttcttgagctggttatgctattttgagagactttggaacctttgggtgctgagggctggctagtagaggtaagtcattatgaggggcaagtcttctgaggacaaggcacaatgcccccattctgttaactgttcctgcttccttgttcaaggtgatgtctgggagcctctgccacatgctcttgtcatcaggaacttcaccgtggcttctctgccacgatgagtccatgataagatgtctgaagctgtgagccaaaggagatcttttccatcttttactgtctctgccaggtgtttgggtgacgtggatacaaaagtagccaccccagagtgagtggaaggagaagtagcctgataggtaaagggattggcagtgttctttggtggtcagccagtcctgggaagggtctgcaacagaggaagaaagcccatgtcctatctgacacagtcacactgggggtgatttgtctacactggttagtgtagctacattgagggtgagaatttataagcttcctctttggtcttgtcataggtaagctaaggttgttcttagttttgggtaagccgtgtggggaacatggttctaggcaatgagctgtttcctgtaacacacagggctggaagtctttctccatcaggaacacagagctttagtgaagcttaggctccgatgacttctctactgactgcacagaacaactggaactcatgactcacactggtccccagggtagggagatcactatgggccttatgctgcccatttgagttcttgctgtgcctgagctagaaggaaaatggtatctggaaggtggcaagaacaggtgagagatccctggtgcccaggctcaggtgggcaaaacatggtagaagtgacaggatgctctgagacccggtgaccactagtgagtatagccagggtaatgggtggcggcggtggcggcagtagcagcagcagttaaaggaccagttcctctgctcctcattgacagctccccttaggtggagcagtggaaggccctttgtttataacaggtattctcaacctctgggtccagacctccttgagggtcacacatctgatatcctacatatcagatatttacattatgactcatgatagtagcaaagttacggcctgaagtagcaatgagataactttatggttgggcatcatcacaacatgaggaactatattaaaaagggtcacagtctcagggaagttgagaaccattggtctataaaatggaggcagctacagaagagttaacctcttctgcgtgtcccgaccctatgttctgacttagctagcaacctgtcacttgctttttggtttctggaggtactttctgtaataatgaagtggttaacagtgaaagaggcctcacaactcaagttctcaagccccagggagttctttttcattctggactgattggagggcagaaaacaatgtggtttcactggctggatatttaacagttctcagtccttcttttggtaatgccttttcaaatagcatcgattcatctgtctcccagagtaagactatggatatgttgtgaggtataccattaaggcagctgcttccgataccctgagctctctggatcggggtgtatgggtgagtctggtccactctgcagatagatgcaggttgcttcactggacagcctgccctggcatagggcaaagctgggaaaccaacacaaagcttttgtgtgcattaggatgcagctcacagaggactttcaagccaagccaactactgtcagggcagggactccccagccctttcttgtagccctgccaggtttgagaactctttccaagagactgagtgatctttctgcaggggcctctaagctgaaccataagctcagacttcgtaatggaagctcgggtttccaagcacattgtgtagtacagctggcctcccagagaggccctaaaatggcaaaggcggtaattctgggagccgttttctctttcctctgaccatgagacattaacaaagatattagcacagccatttcactccaatggccaaagtttgggttgcctcttttccttaattgtatctctttcccccgttatctctcagtttattaagtcatgggattgcatatttgtgaagtaggccatttagggagggctaggggttcagataattagagagggaaaaggtgccctagggccatgttttcaaggcttctgcctcacacaaattaggtggctctgtgttttttattataatttttttaactttatgttaaggtttcaaatttatactaaggaggtaaaaagcacctgtgattatcaccttgtggttgatctttcactcatacacaatccatttaccccttaggtgtgtcattaggatttccccccattattgagcagattgcctcgtgctattgcgtaggtaagaaaacctctccttaccttcagctcctgttcaccatggatatgttggtgccttcccgtcattttcacaggcacagagaatcagatgcaggaaggcaggtgttttgttatccattggccttgtgggaaatatttaaaaatgagaacaggcacacattcctgaacttgtgcatttgccccagcagactggctggccatgcactggtgggcaatgaccaacctgtttttatcttgtggagactctgactcagaactccaagatctctctacccagctcactaagtttcctctggtaggttattaccatgccaaacccatgcttcaaatctcccacagcctttgtggcacacatctggcaaatccacactttgttgctgtacctttctcttttgaactcagacaagccgtcgtatgaaggaaaatgcaacacaaacttagttcagaaacaatggtaactcaatcgctgagcacaacaactaaaatcctaatcttgtaagccttattaaaatctgattcctccaatggcgaatcattgcagatctaccatgataccaggaagctctagcagctacatcttacccctctgctgtccccattccaaaagggcctagctctctcctgcttcctctcttcctctgtccaacctggaagtcctgcctactcaccaagtgattgactcctttattcatgaggggattggttcacaagaagtcacctgaatatgactcactccttgtctacaacccctcccagcagagcagaattagcatacaaacagcacaggacccatccacaacatattggctttcacttctagtgaccagaaagcatttgttaactgtttttgttactgtgtgtgtatcaatggtccagtcatttttattgggaagtgtttttccattgtatagaagcacatgtgtttggttctttaaaactcatgttctaaggagtcaagaatcatggagaccaagaatcttatcttggcgtgcttaatggactctggcttctaagaaaggggcgtttttgcataggtaacctgtcatccatgctttcttgaaatgaggcactatgaccagaatataatgtagaaggaaataaaattgaaatgagcaggttatgaagtagaaaatcaccatcctgtggcttacacttctagcagatactatgaatgaaggctctgccaagggtgaacccatcactcccctttccaagaaaacaacgacaatgttgtcttgtgttggttgtgaaatttgtcaagaatgtttaggaccctttgaagaatgaagatggatgcagccatctgcaagaaaatagagcaaaagaacagtagtcacatgtctgtgctagtggtatgttaaagggacaatatacctccttgcaatagaattggtaaaatggacttgaacaattactatatgaataacccaataacctcaaaaagtcactcgataagatccagttcttactgtgacttaaaagccagccagtagactaatatccctagggatcatgagatgaggtcttgccatgctcaacaaataattctctaaaccttgttttacaatttgccataaacggaacaggggcaccttgattaaagccactgctagcattgtctgagagccccataactcacatgaaaagatgtaagggatgttatatattaaattgtatctcccaaaagaatgcatgttgaggtactaactctgccaaaagtcaggtcactgagatgcactccaatctagtatgacaggtgtcccatgagaaggaaaagggtaggtgcagggaggggaaagatactacgtgtatacatgaaggaatgtcctgctaagatagagttggggatcatggaggcatatctgtaagccagggagtaccaagagcagcagcaaatctcttggagctgagagccctagaaggacccagtactgaccacccattcatttccaacttttgacctcagaactgctaggcaagaccttttgcttaagccacttggcatgtggtgcttttctgtagcagccatggggcacagatacgactcctaacacttcactgacactgtgtgtcagacactattttgaaactcaggcagggaggtttatcatgctagccaaaagctgataaaccaataagaggtggaacagggctttaatcggatcaatctgctttctcagcaattatctaacatcactagctgtgtcatagtcagacccataaatatcacttttaaaagtaaaacgcaggagccggagagatgcttcaacagttaagagtacttgctgtcctttcagaggacctgggtttagttcccagcacctagttctcagcacagtggctcacaactgccagtaactatagttccagggaatttagtacccttttctggcctcctcgagttcctgtatgcatgtggtacacacacttatactcatgcatactcatgtaaaataataaataatttttaagtataaaatacagttagattaataggtgcatcatcctctgtagttttccctggatgaattaaatatttaaatgtacctatagcttaataagagaaccaaaagatgatacacataagtattaatttttttctgtggcaccaaatacttatatagatatcctatgtagaaaaaaattctatgtgggaaatatgtaaaaaagtaggaatgtgatttctagattttgtttttatattctatagttcatgtatatcaaaaataattcagagaatagaaagagtcagaggaatacttgtaagtgagaatatgttaaatagattaatatttttactgtataataacacaaattagaataaacagcccaatcacaaatgaccaaagggcataagtcgataatttatgaatgaagaaatattaatggttggttaacttatgaagagcattcaagctaatattcaaataaaaagtgaaacaaagggcctctgcagttcgccaattaaaatgacaaagattaaaaataatgatgattttcagtgatggtgagattgcaagggagttgaacaatattccatattataagttttgttaattgtaataacagttcttgaaggtgatttgaatatgtatatacatatataattataatacagatcctccatccctagaactccaatgttcagaaagttatcctgaggcaaagaatatagagatgccttaaggtttattttcttgctttaggagtagtaaaatatgcaaacaacaagaaataataagagatatgaattatcaagggcatataagattatgtcaggcattaacattcaccttttggatagtaaaatggcaaaatactcctgatataaaatgtactataaaagctggttaggtggaggcctctatagccaccatgcttctagtacttttaagaaaataaatgtatatatctgtaactagaaaaatattcaacataacaaatgtgacccaggtaaatgtctacagaaatgaattagaaggagattgttgtgttcttcattcttccccagattacctgcaattaaaaaaaaaaacccaacctcatttcttttcatttagaataaaaacaaaacaataagcgtatgtaggatgctcctatataacatatgtacaactttctgatgttaaatataacaaaatatgcagccccactttgatacttgtgaacagccctcagccttcttactctgaacacactcaatcttatcaaatatctatatatttgactatagggtaaccagaataggcagttactccttattcttcatcaataattagtagttaccaaattgtgagctattgggttattaatacattttactgctataaacccctggacataataataactattgtatatttaactttttaaaatatgccagactccccacacctgagattccagagcttgtggtctcctttaataactttaagtgtgtgtgtgtgtgtgtgtgtgtgtgtgtgtgtgtgtgtgtgtgtgagagagagagagagagagagagagagagagagagagagagatgtgtatagagaagactcacaattgttgttgtgactgttagatatggactggagacaccatgctttaggaagtggccctcctttgatgcatttacctgaaaacatgctctgtaatcatgtctacctcactggtatctttattttgtgtagctgccttttacagtaccctctgggtatcattgaataaaacagctgtctcaagattcactgcaatgtttggacccagtacacatctctcattcacctgtctagctgtttcccagaaaattggggattctttggggagtcactagaatcagtgcttcttagagcacaccacaggtcaataccatttctcctatttacgtttccagtaagagctgaactgtatggtttgctagtctctgaaacctctatcaaggttcctagatgactaggccatgatggtcatatgaagagtcttaatgacccaaccacatggtttcatgctgctcccacatttctggcatacatgctacatctcacacatgtgcatgaatgcatgtatgtatgcatgtgtgtgtgtgcgtgtgtgtgtgtgtgtgtgtgacaaatgcatgcatgcttaaatgcacatgtgaacacaaacacatataaatgcatgtgtggaggctagaggtaaacatgaggtgcctttctcaatcattttccacattggtttttgagacaagatctctcactgaatctggagctctaacccactgagctagtctcagtggtcagcgtgccctagggatcacctgtcttttcctccatggggattacaggcatgcgattatgtgtttggcttttacatgagtgcttggtgtctgaactcatgtcctcccgggctgtttccctagtccttagctctgtttcttaaggttagccttcgaggtggctcccagtgtaagcttctttgagaaacccctgttaaagcttccaggtagagatcagggtgattctagtgtgtctgaatcaaaagagcttcaaactcccaaatgggcagcaggattcctagatgatcctcagggcctgcaggctgccacaagtcacatgatatggcctggggcttcttatgaaaagcataatctaaaaatcttcaaccaaaccacctattagattgaagaggataaggtaggcagctttatagcatccacttacagggttcaaaggtgtgattgtggcatggagagaggaaagatgtggaaagagataggataataaacaagactgaaatagtgattgggctcagcatgtcttagaacactgggcaaaggtctaaatcatagtgctttgaagagctatggacaatagcaacttcctccctccctccttttgtccctatcttcctccctctcttcttttttctttccttccctcccttcctcctctttcttttcttttctttctttctttctttctttctttctttctttctttctttctttctttctttctttctttctctctctctctttctctctttctttcttccccatcattgttgtatatttttaagccagaggtaaaatccaaaatgttaatatgaaagtaagtgcatttcagtgaactaacagatcttgtctccaagacccaccctattcccttacctgagctccagcaagaagttaggaacatgagataggccactgtacagatatagcagatgttggcaaatgctgggcagggcacgggtgccttcatcagaatgagggccaggaacatgaatcagaggattaagttgttttctgtacaatcctggaaaggtgagtttgatccctggagcatgtaaatgtggaggagagaaccaagtcaaaggaacatgtttcctttgactatagagtgtactctgatacacccttttacatcacatacatggtgtttatcatagtaatagaaacattaactactatatatcatcatcaagaaatttggcatggctacatggaataatactagccacatccggagacaggcacctgtcatgcctatttgcatcctgtgagagtgttgcagagtcctgaattcaagttattgtagcataggcttcaggttcccctctgtcacattactttccaaagctcagagaggggcccagcagtttgttctgagagtcatatattttataaaatgatcaaaagcaagaacactgtagtgatagttggttaagctggctgcatgatttcccctacagtagccttttcatcatacgtttctttagaaagaggaaagtgggaggtaaggtctttggagtagtcagagtactttctggatgtatataagcagaaattaaaatgtaaacttgggttaatagaataagcacatactgtgtgtgtgtgtgtgtgtgtgtgtgtgtgtgtgtgtgtgtgtgagagagagagagagagagagagagagagagagggggagagagagagagagagagaccatgctcaataccatcagttcatggcttatttaaaatcacttaatacacaagagaacataggatgatcttgaatattatagcacatagatgagaaggatctaaatgatgagaatcctcaagagttctaaactgtataaaaaacaacgtaaacttgaagggcttaaactagctactaataataaagaaatagttttcgggcagattctcagtggttaaagtatctgccttacaagtgtagggactggagtttggatcacaagaatccatgttgctgccaggtgggcaggattgcctgcctgtaattttaggcagagaatggggatccatagagaagcttggccatcaagactagacatatctgtgagttctgggtttgattgagaaaccttgcctcaatggataaggttgaaattcagttaaaggtggctcctgacatccacttcaggcctccacatgtatgtgtatcatcacacacatgtatgtgtaccatcacacacaggtgtccacacacatgcaaaaccatgcatgcatgcacaggcatactatatacacacacatgaaaagggacaaaggaaaatagtaaaataatgcagagatattaatcaagctttgagagaggccatttttagtctccattgctatgaacatgatattgtaaaagccattttaattgaaaaataatcccaagcacaacatccagaaaaccagagagaagataataattactaatgctgttgtttttcaggaaaatacagtatttgtagtggtttttggttactagaatttttttccatatgatttcttttcacattttaaataaacagtgtttgttctgagtttacatctttttcttgaagatgttggtatctttgggaaagataaaacactttcccatagtgtttagccttcaagttttacaaaactcataggattattgtcttctcataagaacttcactctagaaaggaatgagtgccctgtcccaggtcctgcctgggtcatgggctaggcaatgtgcacaagccaggattcctcaggcttctcttcacccattgtatatgctctgcttccttggcggagcatgtcgtcagatgggtttgctgttctccaggtgactccagttgtatttgataatgggcagggccttggaaggccaggggtgggggggttatctgctcagctttcctcagacttccaggtctccccacgtccagaaagtgttcatggtcgtggcttataaaagatacatctcttgtccaggcctctcggggtgagctgttcagggctcatgattgcttgccatttggttaactgccattggtccttatcttaaaagctatcctactctcttgtcctctttacattctgctcttccagtatgagggctcttctagatgcttctggagaactgacttacagcagagatataagagaggtgttgataccaaagtaaagggtacctcaagtgagatatccccctcttcctagatctcctatcccagccgtcaagttccaactggcagatactccaagctcttccagaattcactaattattttaatacccagttattctttcaagaatggatcccatggggtgtaagttctaggcattttggatgggcccagattgtgtccaagtcaatgagggaccatgcctgtggtttgtatgctgcttttgattcctttgctcatttcagccggtgttgagattggagggcttgtcatgtaggccatttaggtcactcttgatgctgtgttttgcattttatttactttccatgagattccttgagaatctacaaattgccatctaatcctgctgtcttttcatttgatctcagtttcccgctatgtctctttcttctcgtttcagcatatatagattacatatagatgtgtgtgtgttgtgtgtgtgtgcacacgcatgtgttgagtatgtgggaattcgtgtctgtattcatgtagaggccagaggtaaacttcaggcattagtcctcagtgtactgttcattttattttattttatttttttgagacaaagtctataggtttctcactggtctggatctcacagatttggcgaagcctgctggccagcaccctcctagatctgcccatttctatttccccaatgctaggactacaagaacacatcactaccacaaataggttttacaggtgtgctcttggtcttgaacttgggtcctcatgcttgcacaacaaacacttccctgactgagccatctcccccttaatgaggacatagaatgttcaccagttcgtgctcttgttattaacatcagcaatgctttctagttctgtttctcctgaatttattctcatatatttttgattcttattttccttcaaaaattatatttcataagtataggtaggatatatcaaggaagggagagctatagaatctaatccaggtcgtctgttgagaccagtgatgtgattggtttcctaatcattagatgtgatatatttctgaacatgggtgttgacagagtagaaaaaccacacacaaccgattaaattaattaggcagattcccgttcctgctgtagattctagcaagggtctagcagagaaggtttgccatttgtatctcaaaatccatttcagtttctgtaactgtagcatcttttctcccatcttcttcccttaattactacactactacactagtttctttccattccctctgaatacccacttccccccgcccccttttcccaggagttgcatggtcatttgggtgaggttctatgagagacagccaggagcttccagccaggtccatcttcaacagagtgtacccagccaaggtcacacagccagctggtggcaaagccaagtctttaacgcagggctcttttctcctaggcaaatcctcagtcttcaggaccacctgcctccttgtcctgtcaggtcctgacaggattattatgtgatttagcaagtggcagctttggtggtagaagttcatttctgtttcagagtttttgcctgaggtgaaatcatgttggcaggggctgaacctctgctttgggcctttgcagatttaagaaagaaaaaaaaaagtgcacagagctggaaattgctaagtgcttgttctggaaatgagaaatgtgtttgtgtgtcctggacatgaactcttaggcatctgagagactgacaggaggtggttttgaggtattgggtctgctttatggttaggcaccatagcgagcaaactacttgccttttaaaggattcatcaaaggctacttctttaatcctcaggagagtgctcccttttgttggcatccatctctacctaggccagtttccctctgcagacaaccaaagtgtcaatatttgagagtgggcaggttggctggcggaactgaggacaagctaatataatgaacacaacagttcacctcaccatccccaagacccaaatctgtgggttgacccagtaccagcatctgggtgatttaagcttcatatcattgaggccttcttatgctctgtccttaaaaaccctttcttctatgtttaaggttcatctggagaggctatggtggatgaatcccatccagccaccacaggctgatttgccagagctgaactgctgaaggggtttctacagccaattatatttaggataatacccagacctcagtaaatattttatctgtgcagttaccagtttggtgatttatggaactctggctgctattaccaggcttaatgaatgtatgggaccttagtctttactttaggtaattaaatgttaatatacttataaaattaaagtacatgaactggtatccatcagctggacctcaccatttcttaggcttttgcatgcatggcactgtgcaatagacagatggtggcctctgaggaaagagaactgtcataactggcaggcataaggggttgtggactggattctgaagtcagtagggtctctattcccccctcttcacaacgattaattcctgcattgtgggatgtctattatgattaggtaagatcatgaaaaattactggcttgatgctgggaccatacaatgcaatgtttaataatgatcactttctatagtggtataccttattaatttgtattaaatattaaaaacattctgttatgagaagagcttaaacaggcacctcacaggctgtttctctctgtatttcactgttcccagctatactgtgagctctgagggaagtagggggccgttcctgcttgtctctgctttatctggggtacctaaagtaatacctaccttacagtagacagcccatagcctactcatgaatgaaatgcgaatgtggcttgaatgaatccacagagggttctagcaagcagtgcggatttccaggatgcagagtttcgcctgtttccatacagaagacagaagatgagttgagagagcttgggtctgggtttgaactgaaactcactctaatcatgactctggctattgggaggtagataggcccaaggaggtcatttaaccatgttcaaacccgggctcccacttttcaaaactgcattttgtctcagagggcaaatcaagggtgactctcaggaccggagtaggatagtccttacagaggacatgtgggttgggtacagacagctgatttttccagagtgggatttgagatcactttaaacgatgtgagagtagttcctctgggagactcttgattcagaaaccacccttatcagggctttctccttcttctgctctccactgggttcctaatggctcctgctccccgggttctcttccaggtgactgtactagttgctcctttcattgctgtgaccctgaacaagaagcaaccttggcaaagaagcattcattttggtttacagtttgaggggacacagtctatcatggcaggaaggaagtagagagtgggtagaaaataaaaactagtaggccaggctataaaaactcaagatcagaagcaagcgagcaagaattattattgccttttactgagttttcctcccagatacttaatcattcattcattcattcattcatccagtgttgtttgagtcctcagcattcagtgatgaatgaaaatgggcatatgtttcctaccctagaggggtgggcctcccactggaagataggaaatgagtgagtgaatgattggagagtctactccgggtgtacggggagcaacctcatccagcataaacacaatggcatggtagaaaataattagagaggtgaggaggctatttttgtcggaatatttgagaagacttctccaggaacttgaattttggtggggaatcatttggagcgagcctcctgaagctccagtgtggtggtgatctgagttggaagagctggaagtgcaaagctcctgggagtgctgggatcttggcttcagcttctaacgatttctgatgctgatgctgttgcagatgcagatgctgatgccagaaaccttcccccattttatcccaaagtatagaaagttttctccctgagatggggcatgacctgtggtcctccttgtctttcaatgctccctctaaataaaaaaaaaaaaaaaaagaaacagacattgctgttgtgtggggaaagatcaaagatggtcttctggcagctgagtgggtagaggtctggccagggtccagggcttctgggctctgtcccagttctggaccccttctcgttgtagcctttgccctttgtctgtttacctacctgtaaaattcggagctgggccagatgatccttcagtctttatatttgagaggacgtgggacccttgtgcctgtcccagtgctgttttggggcagagtgaattgctggttgttcgggctacttttctagctgattttattctcctgctgccccccatcttgagccttctttaccagtgatgactgaaggtggctcttcttttcctaagcttcaacctctcgttgataggttgaggctgagagcaagctctttttcatactttatctatactttatctatactctttatcatagtcttttcctggttatagatcatcctagtgttcatggacagactggtaccaaggaaccttaggcatgagagaatgtataaacctgatgcctcataacactgggagacaaaggccagacagtccatgggaagaagctagttggatgctcttatttctactgcagcagggtatcatgaaggaagttccaatcacgttctggtagtattcagaagccaaggggtcccaggagatggcttgcttatggcctctgttacagatgaagaaacctggaccatggggggaccatcttgtctgaggtcatctagtagaaagtgctgagggtgctgggggctcattatggttactgccagtctatccaggacaaacaagcagactcagatatagcttctctaatgctttgctttaaaatattttataaggtggataatggaaacacttaacctttccattttgaatttatacatggagatgaaatatcaatgtattttgtacttgaaacctactgcgtgctagtctgactctttatagatagttcatccagtccccataacagagccaagaggtggagtctataagaatcttaggcttacagatgggggtaataatgcacatagagtttatattggccaaggtcatacagttaagtgaaacagaagagtttaatggctgactccagggtctacagctttagccacctcactgagctaagaacaaccacctctaatgaaggtaagtgtgtttgtgattcatgaatttcagtgcccacattcacacagtaaaaccagagcccggcaaaggtacaagaacattgacttcagcttgaggacatcatagcttctgttaccctatggttttcccagggtgctctgctgccttgatttccaagcacacggctggtctcaaagacactcagcagcaaggtcatcattcccccttgaaaactcctggctacctcctatctttgtcactttccttcttagacacagcatagtgggccatattgctgctcagagcctcacaaggaagaacccgttgatcagatcaaacactatttccctgccccttggggaatgtccaagacaacatcttgtttataataaatgcaacatccaaagagctctaaagcatcttttcttttttttttttttctattaggactattgtttctatctgttgagtccatgagtatttgacattggatgactttataaaacattctactaattggatttgttaaagcaaataaatcaaacactaattggaacgtgccctgccattatttttgcttactgaattagatataatggtgtgaaggccttcttatcatatttgtgcacttatttaaacacccccctggcacacacttctgcaaattcaattagatattcaaaaaagaaattcaatttatgcaaggctggtttacattcattccgggggcaaggctgggctccccacgatacgctgctcacgattaataagccctacttagatcctgccctgccttcagagcagctgtcggcacagggggagaatacgaatgactagggctggagctctttagaatgtgtgtgtccatagaacagggtttgcttcctgggcctgcaaactctggttactcaggctctagcagctggcttagagcactgctattgccctcttgatttcttaattgtgtaacattatattctgtagggtagttatgtgctggcttcacaacgtttagttgaaccttccttgggatttgctttggttggcagacgcggtgtgattagaattcaacttcttctgctctagactcagccttctcatctgtgcaatggcagtgtcagcttctcacacacaaggtgctttgctaagtcctgaggtattaatagtcttcgctcagtcagtccctttacctagggctgggtttgtgacgtcaaaagtcaaaagactggctgcatctctccatttcccagagaaaggaagaatcattatgtatctacgaaatgggaagggcgtgtcggggtcacagggcatcagacactcaagtgatgacacgtggtactgttctgaagttagccatcctgttaccattggagatgtccatgctactgaattaggattggagtctgcaccccaacactgagtcttccccgttttttatatagcccatggatgatgatgggttttgcatttttaaatggttaggaagatgaagggatgttatcttgtaacaagcagattatgtgcagttttaggtatagtgagtgcagcatatggttatgtacacctgcaaacccagaacttgggagacagaggtaagaggactgcatctcaggtagaacattgacattcattcattcattcattgagagaacatagacatgctaattctttatatattatgttttcttactatagtggcttggtgagtactagcaacagagcttgatgctattgcaataaacagaaccgttaggtagccccaaagattcctgatatatcccatagagttcccatcccctgcacagcagtgtgcatacagcggtcttgctccacaccttggttatgttagtgacaaaggagagagactgtcagatgtagctaaggccccaattctttgaccacaggctagagtgaatattttggatgtatctgctgtagcggacaagtccttcagaagaatgagaccctgctttaaggaagagctcgaaactataataaatatataaataagaaagctcttgctgggcatcccatggccagggattgtgggtagcatctgtgggctgagagtggctgctgggaatagctaacgagaaaatcaacacgccggttctgcagcctgaggaactggattccaccgaaagccatccgagttgagttctaaagaaaatcccaaggtcaaaagttctgctggcacctggttccgtcctgggagaagagaaacagggttgccgatacctgcgtttgttccttgcagattctgcggataccaagtaggcattttaagccactgcctttgggataatttattatgaagcagtggaagacaaatgtgtgttctgtgacaaattacattctgtcctcctcggactcttgagttgacatctatacgctgaagcccttactttcagcataactgtgcttgaataaagagcctgcggatggggccactggggtggggtcagaactctctaggctgggaagagaccccagaagtcatgctatttttctggaagcataccaaggaaaggccatatgaggatctctgagaaggtggtatccgcagcccaggaaagaaatgatcgacagaatcctcccagccaaacctttatgtggaacttcatcttccaaagctatgaggaaacacatgtctgttttgtatgactcagtttatgacattttgttatggcagcatgagtagactgatacaacacacaaagctgacaatatttattccttggtcattcaggggaaagatttgataccccccttcatttaaaaataataaaaactggtactttatgcttttgcaaaggacttgcatagtggttcacacctacctgtacgtgcagttctaggggatccagtgactgcttctggcttctgcaggcaccagacacacatattatatacagacccacattcaaacactaacaattatatatagaatagaaacaaataaatcttaaaataatagttgttttggtcacatctctctctttttctggtcccttttaaccatgttggggtggtttgaatatggatgtccccgtagactcatgtgtttgaatgcttggcctatagggagtggcactattaggagttatgatcttattggagtaagtgtggtcttgtttgaagaagcatggaagtgggctttgaggtcttatatatgctctaggtacacccagtacaacacagagtattcttacacagcaataaaatccaaactaagatccatgtattcttgctatatctggactccaaactgttcctccagtgtttagtgtgagctatctctatatcagtgagtggtacatgaagctgataccatcttctaccatgtaccttcctgcttgattctgagccccctaccctctgcaccgtggtcttcaaggcaagctgaagctgcagagcctatttctgagcattgacctctagatttgagaactagaatcttgtagccccagaacagtatgtgacttgggaatagaggacttgaagaggcccagaactgaggaagatctgtgtagctaccccaaccaattctgtttaaaaggcaatgttaactgctgtggtgacctaatataacaggttgagtgtatgtgtagactgagctagctgggattcagagtcaaactttgtcacttggatttgtgtgacctagggcaagagttttagagcattctttttttttttctataaatttttatttttttttattttttttccattttttattaggtatttatctcatttacatttccaatgctataccaaaagtcccccatacccaaccacccccaatcccctacccacccactccccctttttggccctggcgttcccctgtactggggcatataaagtttgcgtgtcccaatgggcctctctttccagtgatggccgactaggccatcttttgatacatatgcagctagagtcaagagctcaggggtactggttagttcataatgttgttctacttatagggttgcagatccctttagctccttggctactttctctagctcctccattgggggccgtgtgacccatccattagctgactgtgagcatccacttctgtgtttgctaggccccggcatagtctcacaagagacagctacatctgggtcctatcgataaaatcttgctagtgtatgcaatggtgtcagcgtttggatgctgattatggggtggatccctggatatggaagtctctacatggaccatcctttcatctcagctccaaactttgtctctgtaactccttccaagggtgctttgttcccacttctaaggagggacatagtgtccacacttcagtcttcattcttcttgagtttcatgtgtttaggaaattgtatcttatatcttgggtatcctaggttttgggctaatatccacttatcagtgagtacatattgtgtgagttcctttgtgaatgtgttacctcactcaggatgatgccctctaggtccatccatttggctaggaatttcataaattcattctttttaatagctgagtagtactccattgtgtagatgtaccacattttctgtatccactcctctgttgaggggcatctgggttctttccagcttctggctattataaataaggctgctatgaacatagtggagcatgtgtccttcttaccagttggggcatcttctggatatatgcccaggagaggtattgctggatcctccggtagtactatgtccaattttctgaggaaccgccagactaatttccagagtggttgtacaagcctgcaatcccaccaacaatggaggagtgttcctctttctccacatccacgccagcatctgctgtcacctgaatttttgatcttagccattctgactggtgtgaggtggaatctcagggttgttttgatttgcatttccctgatgattaaggatgttgaacattttttcaggtgcttctctgccattcggtattcctcaggtgagaattctttgttcagttctgagccccattttttaatggggttatttgattttctgaagtccaccttcttgagttctttatatatgttggatattagtcccctatctgatttaggataggtaaagatcctttcccaatctgttggtggtctttttgtcttattgacggtgtcttttgccttgcagaaactttggagtttcattaggtcccatttgtcaattctcgatcttacagtacaagccattgctgttctgttcaggaatttttcccctgtgcccatatcttcaaggcttttccccactttctcctctataagtttcagtgtctctggttttatatgaagttccttgatccacttagatttgaccttagtacaaggagataagtatggatcgatgcgcattcttctacatgataacaaccagttgtgccagcaccaattgttgaaaatgctgtctttcttccactggatggttttagctcccttgtcgaagatcaagtgaccataggtgtgtgggttcatttctgggtcttcaattctattccattggtctacttgtctgtctctataccagtaccatgcagtttttatcacaattgctctgtagtaaagctttaggtcaggcatggtgattccaccagaggttcttttatccttgagaagactttttgctatcctaggttttttgttattccagatgaatttgcaaattgctccttctaattcgttgaagaattgagttggaattttgatggggattgcattgaatctgtagattgcttttggcaagatagccatttttacaatgttgatcctgccaatccatgagcatgggagatctttccatcttctgagatcttctttaatttctttcttcagagatttgaagtttttatcatatagatctttcacttccttagttagagtcacgccaagatattttatattatttgtgaacattctatgtgtaagtttcttcatgcttgtcacagccatcggtgatcatgtctagcttatgcggtgactattacaggcaatcagcagcatgcttggcatagggtgctatctatgataccatccctcagattggcatttgctcctaagcatccttctcctgtcccttttccctatatcatcatttcctgaccctagaacagttgagcccttagcagtttcgtctctctgcacctgttgctacaactctgatttctcctcctgttgcctcttgtcctatgggccacctttagcttaccttctttctcccaaagtgatcttagcacatactttggcttcccttctcttacaatttgaactctccaccattgcagaatagggataaatactcttagaaggccacgtctgactctgagccctcagtccctccctgattggaaggttcattgagttcactgtgatgccctaagagaaaggcacagatgtactacatttccttctgcagggtccagcctggcacttcgccatgaataaggcccatgctaatgtattcagccactcattgaatacgagtcaactgggctgtgctggggcctgactttggtggggactcctgcggtttgtgtatgttctcttggatctttggaacctggaactggaaaggcactatcctgtgacctcacatgtctcatcctatgccagagttgtcctttgaactccacaagcatggtgctctgtggcttcctagtatgttctgccccagctatttaggccagagtcaaaagtgtttctttgcctcccccatgccaggtcagctcagattctggtcatgtttgtcaacattgtgagttctctccaccagtaacacttaccatagagaggaaaactgaaggcaaatctgtacctttttaaaaataatttttctttttttatgcttggcctagtttcctatcttcactgagctccatggctggatattaaaggctccactttctattccagaagcggcagggtgggactcagaatctgaatatggagtattctaaaagaggccttgctggaacattggaaagcttctgtcccgcaatgccagggctaatgtcccacctcctctgtttcctgtgtttgagctgtttctaggggtccgtgatgctgcatccataagatgggataggcatggtgaagacagatagcagcgtgctgaagctagtgtaggtgagcgctgcacatgaacactgttaagaaaaaggagagttgctgtttttatcaccaactgtgatgtcatgctttttctgcagctgggaaagtcccttgggagttcctgcaatgagattccatgcagagagcgagagcatgatgcttagctcctagagcaagaactgacaggtgacaatccctgggcaaaatgtgacctgcccacattgttatgtataaagttttgaggaaacatagccacatctgcatgttttcatattgaagatggttgcttttgcattacaaggggagggcttagcgattgtgactgagaccatgtagccacaaagctaaagagatttagcatttggtcctttgtagaaaagtttgctgagtcctgacttagagaaaggtgttgggggttttctgcttgcatatgcaaacagatttgcatatacatccacacctctcacatacagtgcctggaacatgcagaaagtaacaaatctttcgtccctctcctgaacttaattctgctttagaatacataggatcatatctgagaaatgcagaggcaggcacatttatatttttattgaattctattcctctctcattttcaaaagaagagctcatgtttaaagagaaattctgattggcactataaaccttatttatgctttaatgtctcctaaagtatgtatcctgcactatgtttactcccttacagatgctgataagctatacattaccaaatccaaatggattttcaaaatccaatttccttgctacagtcttccaattctctgttgactttttttatatttgacttgcgtcagagcatctggggattttgccacattttgacctcaacctgcccagtgaaaaagctcatctgctcaagagcagagaccatgggtggtggcttccttcccctgtcctcctgtgattctgtgggtctccatcaggctggatggtggcttctggaggcagcctgagctctcttctgaggttgagttagaggtgaagatgtgatttcctccccaggtgactgtgctaagcttgacatcagttgcctgacaccacatggtccttgtgcccgagtgaggtcagcatccaaataaatttctctggggattctttcaaatcatatatcttccttaagtgctctgatataaacacctacagaggggtgaggtcttttgtcttatggtctctagggaggacagataaaattttggatgatcaacatcacctataagaagccttaaggccatggaggttggataaatgcttcctgttcagggttcaggggatcttgaatttcttctcttctcctttcttggtggctcctggtgtctattgcacactggcttattgccatttctgcatctctgtgactcctagaggttcctagttgtgtctctagcatacttagatcttctgacaagaaggttcctcgtggccatcttgttcctgtataccaggaactaaagactcagaagtgggactgggtgtgtgggttaggaactcgtctctgactgactgtcacctgctgtcagtctggagcatatgttcatgctgattcttcatatgccgtctgagaggaagaaaaccatccttaagtgtattttccttcttagtggttttaaacacgttatgcctgcatcaagccatatgagaggggagcaggtatccatatcagttgctatcgccacagtgctttgttttctcttatgtgtgtgtttgggcgatgctatcaatttatattgagaaggattatgagaagcagtctcacgaagctcgccgtgcactccttgtgtggatggagtctcagatagaggtggtgtctcattacgggaaatgaggttcgtcacggattcctgcagaggctcttgtctgatgtacgttcctggactggttgtcattgccctggaacagtttggcttttattataagaacacagtgtccggtacctgggaagctttctctcttgacataggaagctgggagctcagagtcaggcatataaccacagttaggcagatggacatgtgggaaattcaagcatggttctataactccctcctaccttgttttgccttttctttctcttaatatcaccgtgatgcacatcctgcttctgtgtctatcaggctcatgcagatgcatgctgaacagttagacagcatctcttaaatatgctccgctttctaggtttggcaccaaccacagatgggaacttaaatcccactggtcatatttccttctttgctgagaatctcagtactcaatgggaaagtctgcactgtgctcctggctgagatgcagacatgtgtgtgatatagggcagcccacagcctgcatctagaactcccttgtggagagacattaaaagacattcacaagccatgacaaaaacaaggcagggtctgaatatcctaagagtagctcaagagagagtatggcgctacctctggttgcgccaatgaagctcttcttgtgcgagccttctgttgccatgccttcctttgattgccaccacctgcagcctcaaccacaaagaccttttcatcatcagaggaactgagcacagtgtgtcagagattctgtatgtagcacctgtcactgagaggttagcacggtggatggccattgtagttcaggtctgcttccatttcatggttagaaatctcgtaccacttcagctttgtggttctctcactcactcccacctgaagcctctgtagtgcattgattcgtaattatccgtgtaacctgcttgtttgctgctggtctgcctcactgagtttcatatgtctttctggaagccactgtgtagccaatgccaccactgtgtctgctctttcaacaagagtcattgttgacttagcaagtagctagatagaagcaagtattttctctcctcttgtgcatcagtcacttcccaccctcttttttttttttttaatcagacatttccccctgaccttattgcagatttcagggtttttttgtgcttcttagacttctttatctgtgttcctctcaagatgttcatgtaattcctttcctatttcatgcaaagcatgcctcaactcccgaaacaatccctcccaatgggttcggtcctctattgctaagcccagcattcactggggtgctgtcataacctgctcacatgactataacagactacctggggctggctaacttataaacagtaggaaaaatgtcttcttcacagttttggagaccttgaagtctacagtcaaggcggcagctgatgcaggatctgatggcacttttccatagatgcctccattttattttatgcatattttattagcttattatcataacataatagatttaattatgacattctcacatatactttgttcttattgacctcctcccttctctcttctgcaacccccccccccccgttcctctcctgccatccttccgtcttttgttctcttgccatatatattctattatcttcttgaccttccctccttcacagttcctcactggcggcaggggggtggtggggatgtggtggggggtgggcacatgcactttggggcccttttatcaggatgtgaagctcctacatgagagccaaatcctcataacctaatcatctcatcaaaatccttcctcttaacacctcctcagtgttgagttccaacgtaggagctggaagaggacacagacacgtgacctgcagtggctgtggctcagcttgtgatcggagcagatgggtgtttagaggagagtggggtgctgagcgccaaggggacaacccagggatgagagtgggtgtgggtagccaaccaggggtccagtgtaggctcaggtcagcagtgccagctccttttgtgaatcagattgtgcaccgtttggaatagccttcctccttccttcctcatatgaaaaagccccctctcctctagagcccacttgattctctccttcagaatcgtgggctcctgcttctctgctcccaacagctctcctagttggagcctccgttctcattctgtatctctttcaatttcatcttgagcagacttacagtatatgctaagtttttccttgcccacatcaaagggacataagggggaatctggcgatactcactgttgactttctcatcctccaagtgcatggttgtctgatgtctcatcagtttgttcttcaagctttacaaagcacgggctttcagtctacttgtaaagcaatgtggtgggggtgatccagagtgtgttctgtgcttgcttttcagagtcaatccaaacagtgacttaccataagggaaggggtgttctcttccacatgacaggtggggaaaccaagacccctccagaggtgaaccaggtggctccaactcacagctctggagagctgaggtgtgatcgagtcctactggactctaaagctcctgttctctgtgcagcctcccagcccattttgcctgtcgcaggaagcaattacagaggcatgccctggcattcatttctcctacttagaacaagccgttgctgtttactttctcaggaaggaagattgaaatcagtgtaactagccttattaactttcttaaataggggggcctgcagatgctggcgcatttcctaagagcaccaaagcaaatataaaactccagtttgcccgcttttgatttgttcccccccttcaacacctctctggagtttaaaattcaaaactgtaaagggctgatggagcaggggtaatgaaccaaggttcaggcattgggctgtacttacctgtttctcttttttttttctttttctgtaggtggctgttcttttgacgaacattacagcaactgcgggtatagcgtggctctgggaaccaatgggtttacctgggagcagattaacacatgggagaagccaatgctggacccagctgtgcccacaggtatgtgatccatcatgtttggggctgagatggaggtggctgtcttttgcagtagctcatggggaaaggaccttcttatggatcgagctgtctgagaggacagtaggttgatatataggtggagagttctgatccttagaggcacttaagctagggtaagtgaattccttagtgtgaagtgagagtcctaggttattaggatccagagtcctttgggatttcattttactctgagacctttaagctctatctatacatatgatatcactgagttttgctctgtggcgagatggtaaagacattttaaaaagaggcaagttcactcctttcctctctgttatatgaacatgggctggatacacacactatgggatttccactgtcatattactaccactttgatgagtgtgcaggcatctagactaccaagcttctttaaccgtgtaaattcttgatggatgcctgcatgaggccggcctatgagaaatgcacctgctggctttaggagatgttctcaggagaggtatgtacagactctgggagaacactgtcagagctggtgagagtcaggcaaaacatatctacaaggttgcctggtgatgtaagcccagatgtcctacagctccgggacagttgaaacctctcttttgaacagtggaaagccagctggctataggacaggagaggacatgtctatggaggcttcctctccactcactccctggagctcatacactgtcttgtatttcatcagcctctgagccctccctgagcctcacccctcttcttccatagttcactatggccttaaacactagtgggttttgggcttgctctgtactcccctcatggacggcctcaccaaccgaattgcttcgtgttccatctgaagactgacaactctgcatgtgactcccattgccatgtcgtctcagccaactctggggtgagggtttctagagtgtcagtaagtggaggcagagagaatactcagaagaatccgggtcggaaatgtcttccctgcctttgagcttggttccaaagcaagaggtaactggctggatttttatggttcctactaaggaaggaaggaaggaaggaaagaaggaagaaaggaaggaaggaaggaaggaaggaaggaaggaaggaagaatggaaggaaagagagagagagagagggagagagagagagagaaagaaagagggaaagaaagagggaaaggaaaggaggtactaaattggatgttttagatttggtgagatcctatttgacttaaggaggagcaccacttgtctcttattccaatgactaagacatcatgggaaaactttatctgttgccccattgtggattttagtaatgctgacttccctccctccccctctccttccttccctccctccctccctccctccctccctccctcccttccttccttaggtgaaaatctcactgtgtagccttggctggtctggcactcactgtgtagaccaggctggtattgaattcatagagatctatcttccttgcctcctgagtgctgggattgattgtgcatgtcaccatgtccacatgttttgtgctctgttggccagattgaacaaatgtggctcttatagtgcatgtatgtgtgtgcatatatgtatgcatgtttgtattggtatggatgcaaccatgtgtgtatgcatttgtgtgtgtatacatacatacatatatgtatataaatacatatatgtttacatctgtatggatttgtttgtgtttgtgtgtgtattcaggcacatatcatatgtgttcatttgtagctcactcaaaatcatgtaatgtcttgtggactcaacatctccaaaatcattttttttccttccttccttccttccttccttccttccttccttccttcctttcttccttccttcctttttcagatagccttaaactaaagatcttcctgcttcctcctaagtgctgggattgtgaatatgaccatgtctagctaaaattgaaatcttaattcacttattctccttccgtgtctacctaatctctagaatgactcaagccagtggttggacttgtctccccctgttgctgtttggtagtctcttcaggctaatgattccccagctccaactcttagatttgcccagttctttgcctagactctcactttctggtcagaccatctttgcccctctcttgggtaccttgggacctttctttctgggtctttgagtcatcctttcaaatttaatccccactcagaagccgaaggaactctactaaagtatagtagtgtccatttccccttgcccttcttcattcctctccagcctctgtcttgaggccttttgatgtctcctgatgctctgagaagactgagtccctctgttgcataaaaaccttggtggcttatccttccttagtgtccaccctccctggttctgctccccccgtgcttgcttcatattgactcctagaagttgtgagaaaattctgactcccctgcctcaggaactcacatgcaatagtcctagggagcctttcactccactctgcctaactgttgctactcttctcattcagtctgtggaggctctgggtaaagattcccactatgtttggcaagtttctccctcatacacattgtgactgatgttccttatcctcatgtgagaagtccctgtgatttggggaccatggtagccttgtcccagctttaacttcagcacctgtgagatgcagtgtgaacacggagcatccctgagagtgtgctggaagggtgcatggatgcattgcttacccgaggttgttactgaaggcatcatgcatggcaatgcaaaggcctttggtgcttcacttcctgatcacatgttgatcctcttcctcttctcattcccattttacagataagaaaagcaaggttctgggcagcaactttgtaagattgctgcctcttctccccatagcccctctccctaaggcatggcggttgcttctaatctttattttctcagcccctttggatagcagagtgtcattttgtaaatattggatcatgctaatatgatcttctgagcattcctaatagaggcattcgatagtgatcaccgaaatgagtctgtcaggagttcccgtggatctcagcggctctgccggctgcttaggctaagaggtgtggaggtgaatttggataagcagacactattctggtttctgaaatcttacacgtgttctgtagtccaggagtttccatcgcttctggaatctaacttgagtctgtttattccgaagtctgtcgccgtttattgatccactctgtgtgacaagttctgtgtcatacttggcctgggcgaatcggatcatgttattttggagcttaatctctttagtggcttggcctttaagtagactgtgattcacctactgttaggcctaaccgggctatctagcatcttttttcaagtactacatcttaactcccagtgttcacaatactctggctggttctgatgattgacatgtcatattctgtcctgatttaccatgatctttgaacatgctcctcctactcactgtaatgcctttccctaccatggaccattttcttcaagtctcagctcacgtaaactcccatagaaaccttccctcagtgcagagctgaagaaggttcctctggatgcctacttacagcatccaattcttagcttccaaggcccttgttgtagatccagtgttagctttgcaactgtggcaagaaaacacctaggagaaacaacttaaatgaggaaacatttatttgggctcgtggatgtggagggttcatgccaaggtgagatggatccatggctttggatggacctgctgtccagcagaacactgtggcagtaaaggtgtgagataggatttcttctctttcagaagccaggaagtaaagagacagacatagagacagacagacagacagagaccctttaaagtaacgtctttagtgatatttgtcccctagtctggcttgccttcctcaatcttacatttcctggtattccattaagttgttaatctatcagtaaatgaatccattggttgtagagccctcatgatgcaatcacgtcttcaagttcccactgctgaatgatgcactgaacccaagagccttctagggatatttcctatccaaaccacaacccacatgacagatcagcttattccaggcttctgccaagcgatgctggcacctgggtgcttctgttttcccacgttttattggaaaatcagacttatgctggtattataattttcttaggaatccttcagctgtacaatcccctgcatcccggcatcccttccatccctgcatcccatccaatcctgcatcccatccatccctgcatcccatccatccctgcatcccatccatccctgcatcccatccatccctgcatcccatccatccctgcatcccttccatccctgcatcccttccatccctgcatcccatccatccctgcatcccttccatccctgcatcccttccatccctgcatcccatccatccctgcatcccatccatccctgcatcccatccatccctgcatcccttccatccctgcatcccttccatccctgcatcccatccatacctgcatcccatccatccctgcatgtttcttctacctttttttctgaggccagcaactcttttccaggtctaggtagctgcccactcaacaacctgtctttggcctgtcccttcttaagtgcttctgcaaagcagagtggtccagcaagtccttctctgaacccttccaggatgagaaacattctccctcctctgtttagctttccacaaatgcagccctgttgaatttttagcctttctgttatccatggtaagcactctgcactaagtttagatttttgggaaatgaaggaaagaagaaagcactctttactttaatacttggtattaaagcttggtagttgtctgattggaatggtttgggaggacaggagctggggacaaacaaggaagaacatgggacacctggcaacatgatcttcccatcagtctcctgtgagaggaggtatagcttccatgatggctctggtctcccttttatgccctcgggttctcaggccacgcatcttcatctttttctaactgctagtgtttatggagggctgctagcagctatggactgaattgttcttcctcagaggacatgtgcaagttctaaacacaggtacttgtgaatttgaccttatttggaaataatctggtacccttatgtccctaattgcattaagatgaggctgtgctgattatattggatgtcagtctaataggactagtaggacgtcttagggcttttattgctgtgataaaccttggccacaattagcctgcacaggaaagggtttatgttatcttagaactctcaggtcatgctccatcaccgagagaagtcagagtaggaactaagtggggaagcctgcttactgacttgctcctcatagcttgctcagcctgctttattacagcatctagtgcctgcatgtggctggtaacccctacaatggaatgggtactcccacattaatcaatgattaacaaagtaccccagaggattgccaaagtaagctcatggaggcattttctaaattgtggttctccatttttagatatgtcacaggttttgtcaaactgacgaaacccaaccagcacataggggtacaccacacacacacacacacacacacacacacacacacacacacacacacacacgggaagaggtcgcatgaagataaaagcagagattggagtgatgagtctataacccaaggaaagtcaagaatagctagtagacagcaggaactagataaagtagagaaggcttctttcctggagacttttgtgggaacatagtttggtcaacaccttgactttgaacctttggcctatagatttgggaggaaatgagttcttatagtgttcagttactattttgtggtagtttgttattatatcccaaagatagataaagcccagtcaatctcatatcagtggcctgcttctatccctgcccagagcacctttttcacagaggaacttacataagggcattagagatgttagaagctggcatttactctgtgcctactctaagcgagaattagattagacattttttccatatagtatttgatctaatttgcaactccctcatgagttcggagatattgtcaccttttcattttgtagtgtactgggtcccagagaattaaataactggaccaagatcatgcgagctccccgtggcaaaggcggacaggcttggaatcttgactagtaaaatatagatgatatgcatgcttctgtcatcaactgagtatcttataaaatgatttctatttgcagtgtgatttatgagggaaagaccaatgcatattcatgcaagcgactatgcacaatagacatagcgacggaaaacaaagtggaagtcatgcatgcatacaaatacatataaatatgtttcttcatatgcttttaaaaaagcattttcccatatcattaagtatttctcaaatcatgttatctaaaagcttcagggttttccattccaatgactgttccacaatttatttaacaaccctgtctcatttcatattcaagtcccttgtattttcttctaaactacattgtaggcctcattcgtgctcgtacaccagtgcactcatgtccagacagagttaccaaacttgcttccagtggtgtatagttctatgtttattcccttatggtacttccaaggcagagtgctttgcattacttttgagataaggggggaaaaacaccatccacatgccaaaaatgttcgggaaaatgctttgtgaaccctaaagcaggaaaggcgtcaggaacaaatggtagcttgctcagagtaatataatagcttgtggcttagatgttagatggacgggggctttccagtgtgctttaggaagaattatgcatgccaagatggacgtcagctgcacaaaatctcgtggcattgccagtgatgattggttgggtagcaagtttgttcatgggctgtgtaggaagctagagtttgttcttttgtaggtaaaatcaacatttttcttgaaatgtcaccagtgctaggacttaaatatgttaatgtcaatgtctgtcaaacaaattgtgtgtgcgcgcgtgcatgtatatacatctgtatatatgcatgtttgtgtgtgtacatatgagtatgtgcattcatgtgtctatgcatgcatatgtgtgccttcctgtgtgtatttatatgctcacctgtgtgtgcgtgtgtgagtgtgtgtgtgtgtgtgtgtgtgtgtgtgtttgtgtatgtgtgtgtgtaggccagaagacatggggtatcacccttggttgattgctatttcctgctgtatttactaaagcagagcctcttgctgaaccctgagtttattaactgtttagtctattcagctagcatgcctgggacttacccctttcccaccaccacgaatgagtactcggaccacagattaaggctatgcctattgttatattggtggtagggatctagactccaggcctcatgttcattcagaaagtacttcatccactgaatcatctctctcctcagcagtgtcactctgtgtgtgtgtgtgtgtgtgtgtgtgtgtgtgtgtgtaggtctggagaacatttttcacagttgtatcttttctgctgtgggttctaagaactgaacttagattattaaagttttgcgcaagctttttctcactgagctctactgagtattcttctgtgtatcatgagacctgagtggcatacaccccttttcaacctcttccatttattctctgtgtctagttttagaagactgtccttcaatcctgctggctagttttgggaatcttccattgaaatgaggcttggtacactatagagctaaatactgaagtatcacctagctgtccaaggtggctgctcacacaactgggatatggccacctggactcttctgccctgggtgtctcatctgggagtttagggtcagcacccagagggtcagcatccagagctttgagtgtcatgggatagtgatagtgcctgaccaccatgttggaatgaaaagatgttggtaaacttttgcttactggccaactcttttatagtctgcttttttcaagattggtccctttctcttcatgatgtttaatgatattcttccagaacattcctagttttgagggagacagtcagatttgattttttcttgttagccacaaacctggcatgtcccaccatcacgcctttgccatacttactaagtcattttctagagtgtgcctgtcttttcctattaaactccatatcatctaggagtctggaatcctttggacacttttctccactgtgctctgttgctgagtctgcccctgcctgctgcctcacattcctcactatggctaagagcctcctcaagacctggactggatttcctgttctctgcatggagcacatagtggtccatgtatggactccatgggtggtgggtgacaagtggagtcagggatgggggaagaggtttcaggacagttttcaattctgatgttttcatattctcagcagccctgtggctgtcacagtttgagtgtgtactctttgctggataaggctgtgaactggatccagggaaaggtcctttgggcttgctttctgcagagcttgtcctttgatctttgcaccaggtaaaaaggatttgggggattcaccttccttcatgctgaagctagtcaactgctcactggggagtgcaatttggaagaggctctctgggaaaagtgttgtgtgccccaagctcaattattatgtcttccaaagtattaatgctgaaatggcctgggcacatggtctttatggtttcatatcactcctaatactgttgctaattatttcaaaattatacattcctagattcccattcagcttcggctccatcccccctctgtaatgatgaaatactgtatattaaatctttaaaaaagattggtttgtacatatgtgtgtattctttcttactcggcatgagatattcatcctaatatcactattaacagattggcatgtgctgaaaaagagagaagaaaagggaggaggagggagacaaggaagggaaaaaagggaagaggacagtaagcggcagaagatgaggaggagagagagagagagcatacatgtatagcaattatgcagggtagatacacacatactgtatagattatagtaattgtcctgatcataggagagtggtatttatatagcagttaacttgtggcagggtgctatactaagcagcttaaggacattcagcagtataatccttaaaatattcttcttaagtatttttattatctacatcttataaacgaggagggtcaggcacagattgcttaagtggcttgtccaggatcaccatcagcatgtgcttgagtgaggatttggcctcaagaagtctgggcccagcctctgcttcccaaggctgcaggtcatgatgatttctgaagtcacttggcccttctgccctccgtctcttttcccactactgtattcagatctaggttttcgcctcccaagatggcttggtgtcctattgggtagatgagccatggtttattttactagcatccaaaacgtggcagcaggggaacagaaaggtgccatgcttctgacacacccaaagaagagacaaagtccttgtctccagacagtgctctgaaaaatgcttacaaagcatctcattttatgagatggtctctggtgtacctaggactacaaaattaattgggaaaactgcattagcctgtgatgaccccaatcagtgctagtttgggatgtttatagggatcacagaattggtagaaaaagagtggacagaaaattgaatgcaggtttagtaattatagcagcagatatgactgggtaataatgagcgctggctgttgttataaacaagggtcctaagaattgctttgaacagcaaaaaagaaccttgaagtgatcagaatactcatctgctagataaacagggcaatgcatctgcatgtggatggctatttgaatatatgttgccttgtgacatcatatctggatttcagatatgtctgtcatatgctcaggagtatatgcaatagttttgatcccaagtttcccctaaaggtttacgtgttcaaggcttggtgttagagggagttggtggaaccttccagggggaaatattgctaggaagaggtcttagggtgctagaggcatgtccttgaaggtgagagtggggcctcaatcatcatctctcccccttcctcttttctctcctccaccatttctctatctcctcctcttcttcatactttccctcttagatatcatcctcattgtcttcttctccattatttaccttccccctcctcttcttcttctcttttaactccctgggatataagcttttgatttttcagatgtggtgcctcactgtaggcccagaagcaatgggaacaatttattataggctgaaacctggaaaactctggcctcaaacatattcctgtataagctcatgcgtctcctgtgtttgttagggcagcagagttaactgaaacaggataattaaagcagaaagtgatatgcatatatccttcaggtgttttagtcatagacatcgatgcccagagtgcatatgaacagtttgaataaagaatttcctaactgggactcaggagatggctcagctgtaaagagcactggttgcttttccagaagacctgggatccatccccagcacccacatggaagcctgtagccaattgtaactccaattctataggatctggcacactcttcaggcatctgtgggcatcatacatgcaggcagaatgcccatacacatgaaataaaatcataaattttaaaaagaactttatagctgttgagaatttaataacgtacattctccccctaaatacatataccatttgttgagcaatagtctaaggtgtttgtgtctatttagtgtttgatatctcaacaatgctgtgatctaaatgttactctttactcttgattcttatttacaaatgaggagacattaactaatgaactgaaatatttgaaataaatagaggagctgagatttgaatctgtcctttctggctccagacaccttgggccattatccatttttcaactggtaagtaatttatgaaatatgtttttgttgtggtggttttgagataaatttcacccatgtagctcagggtgcccttgtgttcagaatcctgcctcagccttctgagtgttggaattcataattaataattaattattaatacaaatattaaatgcttaaatattaatattaaacacttgaaatattaagtatgagaaatagaggtgtagctaatgttactcctaaaactttatatattaatttaagattttctgaaaacattattgtgggcttctcactgggaaatggaaggaatggtttacttaaaatgatgttttttacagtaaaataaatttgtgtatgtgtggtctgtgtattcattagtggatgtgtgcacatgtgcacatgtgcacatgagtttacatgtatgtggaggccagaggttgacactggatgtcttcccttaattgctctctacctttcttttttgagacagggtctctcattgaacctgaatttcatcaatggagctaggctagatggtctgtgggctccagggaaccttctgtacccagtcccagcccctgggttacaaacatgctgtttttatgtgggtgctgggggttgaatctcaggtcctcatacttgcacacagcaagtactttattctaagaacagtgagtctggtttaatgattaggcttgattttgccagtttgtggagttgaccaagtcactcctgctcagtgccagcatcatggaagcgaccatgtcccagaaactccctgaacagaacaagagagagatgagctttcttgagcccttcagtctcctccttcctccccctcactgttctcagaacaccttgaaggcagccatggccaagtatccttccagccctggtgccttctgccgtctgttgagtattcttcttccagactgtttatgtaaaggactgaaattccagaggccaggcttctcctgagttaacacttcctttctgagtgtgtccactgtcttacctaatgagggggcaagtttcttaggctctggatgtggtcgtgatttgagttatcattgcacatgctgggagatttggtaagaaaagaaaatcgtttagtacaaatggggtagtctctttagatttagtgaaaatcagatggctgaggcacctctataaagcagaacccaataacttggaaaaagccaacagtcaactgtcgcctcactgaggcactagcagtttagcagccacagccacatgggtgagcaagtctgtaaaatacagctaatcttaatccatctaaaatacaaacctgttttaaagggcttcattatcagaagagcacataaaacattttcgtttaccaatttccatgtaatgtgttaacatcattttatatatttggagttagctagcaaaattgatcgtgctcatttctagcccttttgatatggcacctagagtatttaaaattccacgggtggtgtgtattatacttctgttggacagtactgtcacagactgtcagaatttattgtgccttctgttcttctgcccacggggatgtctctcattgatgatagtaacagctggtgtatattgaacacttactgtatgccagggtctttaaatgtgtcctctgcatggattatagaaaccccacgttgctaagttacttttataattgtctttccacagatagagaagtcaaggcacagacagattaaataccttgcccttagtccccaaaggagcaaagggcagacaggatttaaaccaaagccctggcccgtggctgttactgatattttttaaagctcctgctttctgcacatggttctaagatttctgtttctgctttgtgctagtctctttcccgttctcattttctctgccaagaagtgatctgactatccctcaatatccctcagagccttttggttgtgtgctttgtgtgtgtgtgtgtgtgtgtgtgtgtgtgtgtgtgtatgcacacacatgcataccaatgcacatttatatataggttgtagttctttcatttagccttgacattctgtgaaagagacaaggaaacgtctgtggtatttgtcatgccctgcaactctctagagccagaaaatagttttttttttttcttttggttttctgtacttctgtactggctgattttatgtcatcttgacacaagcttcgtcagagaggaaagagcctcagttcatgagatctaactataaggcattttctcaattagggatcagtgggggagggcccagcccatggtaggtggtgccatccctgggctggctgtcttgaattctgtaagagagctgattgagcaagccatgaaagaaactcagtaagcagcaaccctctgtggcctctgccactgctcctgcctccaggttccagccctgctggagttactgtgtggacttccttcagtgatgaactatgatctggaagtgtgagctactgaataaaccctttccttcccagcttatgttttggtcatggtgtttcatcatagcagtagaagcccttgagtaaggccaacttcctactactgtttctgtgattttatcctagctctgcaacttttgggtgtgtattgtcctctgtgccttatttaccattatgaataaacccagaagaagttcttctggtctagcgtcctttgatttgtaactgaggagtgaagtaaatggaacatctcaaacacaagaatttagtgattcttgtgtaaaataagacattgtgaaaaaaatttctacagcctcactcatccatccatctgtcgtccatcggtcaggcacgacaggtgccgctgactctctgacaggagaatttgtcttcatgagtgtgtggagaccaagtacccaagggacaatctgtccctgagaactgaagcttgcacattgagataaatcccccaggtgagcataaggtacttactttgtttccaggcgtccagagagctacaggtctgtactgtgcacaagtttggtctacattgtgagtgcaaacccagactggggttcatagaaaggactcatctaacaaaaaattaccccatgtttctgaaaatatcttctgtcacacagttttgacaatgctcagtgctagctttctgttggggaagcaacagtgttctataccactctcaaatatgccagtatcttttaaaaacacgtcctttcctatgtattgtgttctcatttaaaaagaaaaagttacattctcttagaattcaaagcattatctgtcaccatcaaaacaacttgtaaaagcctggacaggccagagtgtgctgcgacctttaagagtcttggagtattctaaggttaaaggaagagttttagcgctaagaactctgtaaagccagacctgctggggcaggcaagcctgttaaacccatcaatttggaattagtcaagaaaacagaagccaccttagggatttccaatgggaatgggtttcacagaaggtatcagatgctaaaatacttagaagccatcacctatgtggtcaagtatcttccacaggaagcaagactcaggtatggggaaggactatggcttccacaaatgatcttggatcaacagatttcgatatgcagaagaaaactgaacccttatctcatgccacacactcaacattaactgaaaacgagttagagacctaaacattggattatgaatctttaaaatatatgggagggagcttcatgacttgggccagtggcttctttaaaaggacataaaaaaccataagaaataatagcaaaaataggcacacagaactacataagactggaaaacatgtacatgtgtgtgtgtgtgtgacaggaaacaacagtggaaacaaaactcatggagtagaagaaaatgttttcaaaccacatctgatgatccggggttaatactgaaaaatatggttactacttacaactcaacaacgtaacaaggcattgattgaagatgggcaaagacattgaatggatagttctctaaggaagccatacaattagtaacaagcatatgaatagattttcagtatcactgatcatgagataaatttaaacccaaatgacaacaaagcttacatttatttggatggtttcatcaaatagaaatcaaagcaaccaaaagtagtgaatgaaaatggcacagatttggagaaattggaaccactgtgctataggcaggagtgtaacatgaatcagcttctgggggagacaagaaatctgaaagagagctgcacacgctctgacaatcccagcttcaggtgtgtgtgggacacaagcagggtcttgaagagataggcatgcatccatgtttcagcatcattcctaggagccaagagtcaggatcaaccaaaacagccacttacaggcaagtaggtaaagaaaggacagtttcttttcttttcttgttactcaaagagaaattttattgattaaaatttccccttcccctacctggactgcctggctaggcctcagttggggaggaggtttttagtcctactaggactagatgtcccaggatggggtcttacccaagggatctaaggagaaggggaggagatattgggggaaggaatttttaagggcaggactgggaggagaggggggctgggattgggatgtaatatgaataaaaataaattatgaaaaaataataaatttgttacttgataatttcatgcatgtatatagtgtgttctcctcactctgaccccccatcctctccgacctccctcttgcccctgatacccctcctagtctgtaaaggctcctttccctcatccttgactttttgttacactttgcatccctcctctgatttttaaccagaacagtacaggaacaggtgtgatagacatgcacagggatattactcgaccttcaaaaggaagagaagtctgactgcatggatgaagtgtgaggccattatgtggaggaggaggaggaagaggaggaggaggaggaggaggaggaggaggaggaggaggaggaggaggagacctcttaaaatggcttaacctgaatgatcccacttacagacgtacattactgtggccaaatatatgcctcacacagctggtgggaggaaatgtttggtcagcttcctctgtcaactcaagaagaattgggtcccattcaaccatggctgaggtggcttctgagcatttggttgactgaacctggaaatactacttccttaagaagccctttgttagtggaatattgcagggactctgtctttttaaaggaaatgctctccaaagagtttacagttttacagtctggaggctgtgatgagtgggctctcactaattcctgaaatacagtcaaagcatcctttctgttatcctggtacacattgcttgcttttctaatggcactaacttcttttatacccatggcctttctagcctcagaattacatgggcccatactcatttctagctttccatcgtgccttttcatgtctttatgtcccaccatttggtctcatttgtctctggaaacctggctaaaagcacacaacaataactatgttgtgccctgaatgtgagtctgtatagaaatttcctctgacaaatgcactcggttattaggtttgaattcagtcttactcaggttttcaagaagtgggcaaattgtcgactttttactttgggtgtatgtgtgtgtgccacattttaacatgaatgggcatctgaccatttcccagtgatgtgtctactcccttcagaaactgcatggctgctgtctttgttatctgtaattctggtggcattctggccttatacactcgccctggaacatcctgttatgcaccacttaagaaatctagggcttcctgagccctcctctctaaattccgcagcagttctaatgatacagacatcacacagtcatgtctagttgctcatttctctgctacaaattttctgtattagttaattttttttgtcttgttttgtccctgggacaaaaatctaagtaaaacaactttaaaggagacagggttgattttgactgacaggttcccagggtttaactcatggtgactgggaaaatagggacaattaactcacggtggtgtccaacacatgtgttgaaagctgctctcactttggaaactgattgcaagatgggaagtaaggggctgcatctaaccttcaaaggtgtccttcagtgacctgcttctgccagccaggccccatttctaaaaagttctgcagcttttccaaatagcacggctacttgggggaataaacatttaaaacactagcctatgggggacatttcagatgtaaaaacacacaatgagattcctataatagagaaaataataaaacctaaaataggcttgagattgctgccactgggaggagaagcggaggggcatagtattaaatggcatgctcatgttatacaagtagagctctgtgaggtggtagtttgtaaataataggcgtttatttctcacagtcctatgagctgaggagtccagggtcatggtcctggactcctcaataatgcaataatggagtcgcactctgcatctaagagactatcaaaaagatggtattgatggaacacacacacacacacacacacacacacacacacaagtatgttttcacatgacagatgatacttaggtctctgcagccctgttaaggtcactcactccatgcatgagggcctggccctcgtgacttaaccaggccctcaccacttgatgttcatacatcaagcttctacatagaaactttgagggacaagtgcattcaaagcacagcaagtgcacgcacgccacattttggttttgcaaaatgaaaacttcaatagatattttgtgtaacaattggccacagttagctctacagaattatttgtttagaacctggttcctggctgttttgttcctgagatgcagggttgcaaggaaccagatatttagtccctctgggccctacacaatgaaggcaaattgagtaggtaaaaatacagtgttcttgtatttttgccataacatgggatctgtgaggctattctgttggggtatgatgcttggcagtcaaagactttatggcttcttcactaaatagaatgaagagaatctcacctgcactcaaggatgtgtagatggacacagagactcattctaaacacagtatagctgttgtaaaagaatacttgtttttctttgggggttagtggtagtattgataattaaaagatagacttgatttaacaccaggatgaaataaaatgattatctgattttactccatcaaaaaaaaaatgttcagttttacaagcctgggtttttaaactttacacaaagttttagactttataatgtaaacaataatcacagaaagattatttttcctagatcgaaaatctttttcctttgattaaaataaaaagtcaccaacctttgtcctggagtctctacatagttgacttccaggagggttaccaggggcatcttctcatatgaagttcaagggcaccacagccaggagagttgcctggagtgccttgactgatagtgtcgactgccttctttggcttagggttttctgtaaccttgaagagaaggctgtgcaactgggaacagtgagattaaatgtcacaaaatgttgggtgtgtggacccttgagagatttcaaacagttgacttccaagggctgaccagtctcagagctgaactctcccttggattgggatgtctacctgtcctctggataaaactcatgcctgtccctttttctctttttatgcatattgaaatgtgctaggtgctaattgtggtctgttttactctatggagtccatagttcccttttaccactagttactgaaggctctttgtttacttgtatgctgagcttcagcagcgagttccagacatggctattttagagtccacatatagtcacctttactagtttctgaattaggttgaggatatcattaggggtgctggttctgcagagaagaaacagaaacagttggcaatggcccactgtaagagagaatgacgaccaggtatctgtagtgactctctgaacacagatcaacacatgacatttcagattctacatgccttagccactgttgcctgtctcagagagagctagaaatgtcaagttgcatgttggcaattgtctgtttgggggatctaaggcttcacatgatctgttcagctcacctagaaccatcagggtaataccagctgttcccaagccctggcttgtgactggggtggggaatcagccagattatggagtatacatccttttaaagatccccgacaacagatgaaggtcttcctaccactgaactccagccatgcctgctactgtaatcgtacttaggaaatgaatttaggagaccagcaggcttagtcaggcatgacaactaataacatagtcccagcattccagatccaggagcaggaagatcacaaggtcagggttggctttggccatgtggtcagaccttgtctcaaaaaacagcctgcaaaccaaaattcctcagacatcttttagacctggatcctggttatccttacagagctactcaagaactcatgagcatttgtgccctgcagtcttgatagacctgaggacttagtttctgttttgacaaggaagagattatctatagatagcaattttcagaaccaggcttcccacttctcattctagaagctcaaaaacaggtgggtctgaatcaagtccccacccacttgcctcaggtctctccagaaagggggacttctgtggcaggcttaagcaagtagtttacctgaatgggcagatgccctggacacatgggctaaatgcttaggtcatgtcaactctcccagctgcccaagtcttgcctgagtcataccacagttctgggcatcatggatccattaccatgaatagatagcatggcaaagaatcacctctttgtacccaagtctctcttcttgtgatgtaagactggaaacatctgtctgcctcatgttgttactgtaagtggacctaaggcaatgggaagcagatttggagaactctgtctttctaggtatttcttgttgctgctgttactgtgaccttcaagaacagctggtttcaaacttcctgtgtcaaagaactgtagtgctttctgaaaagaccacccctgcttactcaccagcccctgggagggcggattaaagttgttgtgactgcaaacccagccgatatgggctgtaatatagtaaattatcacttgttttgcagtcttgacgagaaaaataaatgcaattacactcatgaatgttgaaaaatgaagcaaagcaatgtggatcggcacatttgaggtgcttttccaaatgaaaagctgcctacaatgaatgctaatgggctccctccctccagctccttggcatatggtgcaatgtgatctttctgaattaagagagcagctgcaccaagtggctggccatgggggcagtagccttcaacagcctccatgataggagtctcagcaagtagacccaatgttctccctaacctgggtacccaggatgggcccagtttcctaaagatgatactgaaatgattttggagccatctctctgtttcaggattcttgactgtactctgtagtttactctgtgtggcaagcacacattgaacagcaactatatactccacagtgtactgggagagagggataagtcccagacatcctttccctgctaatcatacaagaccttgccacctaggcccaaggattgcaacatccagctttgtgttgtcatgacagtggccaccgtacacttaaaatatggctagtccaaaatgagatgtgcttgaagaataaaacacatactggaacataaacatttaatataaaaacaatggtcaaataattgggaaggtgggccaattatatgccagtagcacattattttgtttaagggactggggcgccagaggattttctgtttgcatggccttctggattctgatgagctaagttaaacatactaaatgttttgttttgttttgtttttttaaaccttttaacatatggctgataaaattttttgaagggagaggatgacttccacttacttctcttgagcggtgtggctctagatctgttttctggttacccacatcttttgacacacactcccttttggggacactctgttagaccttcagcctcacctgctatttgctgtctcagggacctggtacttggggaaggctttttccagagttttctttcaatttaactgtcaccttcagtgagaagtactctgtgactgtccttgtagcatatgtatctttaataacactcagttctatgatgtatgtatttgcttcagtatctgtttctcctaagagaacagaaggaaggattgggaccttctgttttattttgtgctattttcaagtgtgtgtgtgtgtgtgtgtgtgtgtgtgtgtgtgtgtgtgtgtgtgtttgtgtgtttaactgcacctattgtgtggaggtcagaggtcaaccttggtgtcattcctcagacacaatccatcttgatttcttgagaacaagttttctctgcaaccttggaactcaccggttaggtgaggctgtgtgaaccccaaagatctgcctgtgtttacttccaattgctaggattacaaatgtgtgccacagtgcctgactcttttgcttaggtactaagtactgaactcaggtcctgagagtttcatggtaaatactttatcacctaaactatccccctagctcatggttttccatgtcaatcttcatgttactgtagcaactgacacatagtagatactcagattattctcttaaatgaatgcatggatagttaagtgtttcatttatgttaccagggagaaaccattttggttatttttagattgctgatgtttgaataagagtcaacaatgggccccaatctatcaatcaagtgaagtctgaatgaaaagagagagactgaggaatgatgtaatgaatttggtagagtcaggattatgtaaattaatgagaaagctaagtacaagtggctgaactcagagaggagtctaaggggccagggcagggaagcccattagggaactgcttgaagtatggacaacacagccatccattgccttctgtttccctttggctgtaatgagccagggtagctggtgcatgatgcctggagatgaaggccaaggaggctccccctcttaagtacagagcacggaaaagggtctatctggattgaggaacagggacactagttacaaagtctagtgggagaacagacagtaattgttacccccaaaagacctaaaaagctacttccttttaatgtgagggaatgtgtctattccagaccaacaaccctctcctaaaagtattctaaaagtaggatgctcatgagcattaaaattgtttaacattcatgaagagatttctggccattgaatgggaagtgtaattatgggaggcataaagttgttatttgcagaggatattattattcacccaaagctcaagagaaataagtgaaaaaccattacaacccagtgcaagagtacaacagggcagccagtcagggactaatcataggaaaatcaacaatttcctcagccttagtaataactagttataaaaataatataaaatgattaattttgctaaggcatcaaagtatagaaagctgaggaaactcgagaactagggacttcagaagggagctgaagagtaaaatggagaaaaacaaatgaaagaaagagacagatcactctcattccgtgacaaaggcttcctactttaaatcttgtgggattaggttttgtttaaagtgcgtttcagtagcaattagtgagcagggttacaaatgaattgtttagttgatctagaaaacataaatgagtacagctgaccagacagatgttgggcgacaacaggggagggatattattactcccagaagattaagagaacagaatatgtcctataaagagacatgcatatgcttgtatgactcagtgtgtatgagcatacacctatgtatgttagataacctggacacttctaataagtgagataagtcaggatgaaaattcatctacagtgaggtgtgggctaagttgggatagagttttttccttttttaattaattgatttatttactttatatcctgatcatagcttctcctccctcctctcctcccagtctatccctcttctttcccctccccaacatcctcctgccctccctttcttctcagaaaaggctcagaaaaaagggaggcccgttgggatagatttttaacattcactatcaaaatgtattccagatgaatggaattagtatcatttaagtgtaaaaactttaagtctctatggcatgtgatgcataagtgacttttatttatttatttttgtttttgtttttgttttcgagacagggtttctctgtgtagccctggctgtcctggaactcactctgtagaccaggctggcctcaaactcagaaatccacctgcctctgcctcccaagtgctgggattaaaggcatgcaccaccacacccggccataagtgacttttaaaataattttaatattagaacagctcctggaaaaagagcaacaatgacaagtatttcaccctgaaaaaataaacaagaagaaaagacctacatcaaaatgagccttgatacatacacacacactatttaaacatatagctatataaaataaatgattgataccatgaatatgaaaagaacttctacaaatcaataaaagaaagacaaatgatccattagacaaattttgtgttggtgagacttctgagaaatactgtcagtgtaaaacacattggtacaatatttagagagaacaatttaatatctgtcaaaaacatgaactatgtatatctctggcccccaaatttattcttgaagctgtattgcaaggaaataatcaaagataagcctaaagtgacaagttctgagtgtgtgaccccgacttcccagaattctcctctagccactgtactacagaataaacgagcttgcttcccgggatggctgcgaggtttcttttggatgatttgcctgtaaaaagtcccgggagaatggtgctgtgtattcatggttaacttcggggctcccacatcttccccttccttctctaccttggggactattgtacatttcagctctaggaggagcaaaggaaagagcactacacccaaacacatgtttaaatttagtggcgcttctttaagggtagatgttcagttttgcgagacatcatttagtaagtgataacagtatgcaggcgaggacttagactgggtgtactggctagttatgtgtcaacttgtcacagctggagttatcacagagaaaggagcttcagttgaggaaatgcctccatgagctccagctgtaaggcattttctcaattagtgatcaagggggaagggccccttgtgggtgggaccatctctgggctggtagtcttggttctataagaaagcaagctgagtaagacaggggaagcaagccagtaaggaacatccctccaaggcctctacatcagctcctgctttctgacctgcttgagttccagtcctgacttccttggtgataaacagcaatgtggaagtgtaagccgaataaaccctttcctccccaagtgcttcttggtcatgatgtttgtgcaggaatagaaaccctgactaagatactgggtattgggtgaaaaaggatctctgcttgggtacacgttagcgagggacccttgagtcctcttctgcatgaggccttgaccttgacccttgtcttgtttagaatagtttcccccaagaactcctttaggactgtgttaatttactgagacttctactacccttggtccgtttcctttcctgtgaatgtggtaaaataccctggtaaattcaacttaaaggataaagggcttgttttaactcacagttccatgttataatccatctcagcagggaagtcatagtggcaggagcttgagggagttgggtcacatcacgttcattattagatatgaagagcagcatgtgagcggacacttatgctcagctcatgttcctcttcctatacagttcaggattcaagtcccatgaatgttccgctctcagtgggtgggtttttccagctaacataatcaaaataatcctccacagacatgcccataagtcatcctaatgtaggcagttcctcagtgcgatgcttgccagttgattctagattgtatcaagctgacaattaaaactagccatcataggctgttattaaaaattcaataaattaggtaatttttaggaacaacaatttctttctttcctttgtaggctaaggaattcaaaacgaagtctcttgtaggctctgtgttcagaggggtttcttcttatagatggagctttggagtttgtcttagttagggttactattgctatgatggaacaccatagcctaaagcaagttgggaaggaaagggtttatttggattaacacttccatatccatagtccatcactgaaggaagtcaggacaggaattgaaataaggcaggaacctggagtcaggagatgatgcacaggccatagatgggtgctgcttaatggcttgctcatcatgcttgctcagcctgctttcttttagaacccagggccactggtccaggtatagtggtacccacaatgggctgtgtcttcccaaaacaatcactaattaagaaaaggccctttaagcttgcctataccccaattccatgggggcttatttatttatttatttatttatttggttttctctgtgtagccctggctgtcctggaactcactctgtagaccaggctggcctcgaactcagaaatctgcctgcctctgcctcccaagtgctgggattatagccatgcgccaccactgcctggcatgggggagggtgtattttcttaattgggattcccctacctcagctcactctagcctttgtgaagttgacataacattagccaatgaagagttacattttcattttgtagaaggggcaaaacggtcttctggagtctccttcataagggagttaatctcattcatgaggcttctgatcccacgacatcgcctcacagcgatcttatcacttagggggctaggatttcaacagaattttgggaggatataaataattggaccatctatcctatagccatggctgacattcagccataactctgctaaattaactcattatgtgttctcctactgctcctggtagtatttctctgtttttgccctagctctgttttctattgcaacaattttaaagaaaatctgtggtaacattttaccatggcaaatatccatgtcataacaaattcctgcctgccctataggagctttagatctaatagataaacatgagggcagccccacaatcagctctttaaaggaacacatttattcatggactcaagagatgtataattaagatttataatatgttataacatattagatgatactgggaatacaattgggagcaaacaatatcccctacatacccactaaaagtagagtgagtagtggaggagggggttcctcatctctggtgttatgcatgagataggggtcccaggtcaagaggagagagtccctgcaggagatgcatctcaggtacatccacagtgagtttaaccttcacttatggaccacaaggccctatggtttcagagctcttgtaagcacatttgtgagtaagtaggatgctagatggctcaggagccagcctatctgggaagaagacagctgaggtttccagaggctgagaggagacacggacagggagattatcctaataggattttgcaaagaccacttagcagtcgctgagcttggggggaaagtagttatgagctgagggtggagaaatagccaagaatctggcaactaggcgaaagcttggagagaaaagctgacagccaacagacagaacaagatgatgcttgcaaaggagtaaaaagaataggctggggcggggggaggttactctgagagatgtggatggaaacaggagcgcattaatataagtggaggctgcacatttagataattccagtgctgagaaggagcagagccaagactttttcattacggtgcttcacacagtcagagacctcatggaaacaaatgtgggtagcagagggtcagggttgatgtggaatgaaatccgtggacataaaacactcacaggaatatggacgctactccaaccccacttctgttaagagacagggaaacagagcccccaagaagtgagggttcacatcaaagccacaacaaggtaatggggagagtagaagtttgggtgctgctgatgggtttgcaaaaaatggggtagctatggcgggaggcagttgacagaccctcaaaaaagtgaaacatggaggttttgtttttaaaatgagcttgtaacctccttgtgagcatgtaccccagaccccatattgtttcacagagcagaaataagtgtgcccaatggactcagagtgggctttgtgactactagtcagtgaccgcccttccatggcagctggtattcttccttgcattctctcctcttctcttccccctcttcattcacatggccacatcgatggaaacaagactttgatgtcaccagaggggatgagcctttgcaggcctggccgtgtgtcaacctcccacataacttgccaacacacagttatgatttcagatcagatatccatgaaaggaagaaagctttcctacctgtagccatgaagctaatgcattctcagtgtggaaacaaccattgcctagtctcactgtttaactacgtattccacagtgtttgctttctcccatttccccagtgttagaaagtagttgcctatttctgtttactggaacacctctgaattaaagacttttgtatgccataccttctttgaagacattcaatgtttgggttttgttgttgttgttgttgttatttttggttattttatttatttacatttcaaatgttattattccccttcccagtttcccctccaccaaccccctatcccttccccttccccctgcctttatgagggtgctcccccccactccacctcagcaccctagcatttccctaacctgggtcttctagcatccaggacccagggggtcccctcccggtgatgcctgctaaggcaatcctctgctacatatccagctggagccataggtcctcccatttgtactctttggttggtggtttaatccctgggagctttggggggggcggggggtctggttggttgatattcttgttcttcctatggggttgcaaaccccttcagctgctacagtccttgccctaactcctccattggggtccagtgctcagtctgatgtttagctacatgcatttgcacctgtattggtcaggctctggcagagcctctcaggagacagctatactgcctggtatagctgtcagcaagctcttcttggcatccacaatagtgtctgggcttggtgactgtatatgggatggatccctaggtggggcagtctctagatggcctttccttcagtctctgctccattctttgtcactgcatttctttttgacaggagtcaatgtttaattaatatgaattactttaacttttttctttgtttggagggggcagtcatatggtgatggtatttgaccccaataggttatttttgagtttctcttttctttttttaagattgaattttacttttatttgtgtgtatatgtgtatatctgtttgtgtgcatgccacatgtatggtggtacttggcatggccagatgagtttgcctgatcttttagcaccagagttttatgtagttgtgagatgcctgctgtagaagctgggaacttaacttgggtcctctagaaggcaggaagcattcttaatcattgagccatctttccagcccctatgctagattctcttttgcttggttccttactttatctgagcactgtctgcatcccctcttaggagagaggaagcctctggagacttgcaaatgggactatcagatatagttagacatagagacaatggcaactttgtttctagtctctatgcctaactatatctgataattgttagtaagataattttaactgacttggcattgggaaaaccctcaaaaggattggggctgccttctccagttcctttgtttttctccagaatcaatagaaccactcctttaagaagaggtccttctgtttcacaggctttggtctttaacttcctagacctgtttgttgtcttagcttatcccatgtttcatgtgactcgttatcatttctttatgatacggagttctaagaggagtttaaggaaagatgtccagccatagtgggctatacactctttaggtagctcatgtttttccccagggtttaaggatgcttttttaattgtttccttcagatcaggaatttctgtatttagcttcaacagtgccattccatttgaaagaagaggacagacattgattcatcttctttcagtttgacctggatgaccttaaaaatctttgacatgaagttgaggtactttctgtggtttgggatcgatcgtgctttctgggttcttttaacttcttgtttatgtcattcagctttggagatggaagccctgtgaaatggcatggcaaccgccatattttctggaagacttggcatcctttctgctataccttgctgggcgattataaatacactcttgcacagccagtgtgacacgctcttattgcaaagggttttcaatgaccgtattcactgaaatggcctatttatatgtcaaatgcattattggataagtgcttttgtaagaacagaacaactacaaacaaaagacccaggttcaggctgccaaaagatactgcagggcctctcctgccgtccctcccccatcaccccatgtgtccatataaagttgggacagaggggctcagtggtgaatagatcttaagtgggcaatggttttcagaggactgttttcctgttttcgcttcaagatcttaatgttattgatggcattgctgctgctgttggacctagcatcatggatctaatttaatttaatttgcttccttgcaaagaaggtgatcccttgcgcagctgctgctctgagcagagagggagcaagcaagcatggagataaaggctgaaccttatcagacctctccaaggtttatggtaatgagtacagcttagagagtttgggaacttttttcctgtgattgctttaactaccatgctgcttcctgggcagcaaggcatattgtgcctccctgtctgctgtgcagtgaggagctgggagaggtgggattatgtgggtagtggattctacagcttccaggtgtcaagctaagatgagtataagacacatggcaggtgtttttctatccattctgtcgctgtgtggctagggaaggttttcagggagaattatgatgggcagcaggtatggttaggtaatcctgcactaaatccagcttatgacttcacaagtttatctctttggaggaattcttcaaactttctgggatggcttccttaagtcatacgtgaagaaagccagtgcctctgggcgagactgccccattcttgtctgtgttctcagcaggatcagatatttttaaaatttagaattatttctaggtgtgtgtgtgggggggggtgtatgtgcatgcgcacatgtgtgtgaggatcagatatttttaaaatttagaattatttctaggtgtgtgtgtgtgtgtgtgtgtggtgtgcgtgcgcacatgtgtgtgagtgcacacagaagccattatttctaagtgtgtatatccacccacatatataccagaagccagaaatcaatctcattttccttctccaagagctgtcatttttatttttttgaagcaaggtctcacactgggccctaggcgtcaccatttttcagctgcatccactggctcgtgagctccagggatccttttgtctcagtatctccagtagttacatcataatgtgtgctaccatcctgggcttttggtgtgtttttcagggattggacttaaggctttgtggtttgccagttaacacctgtccctgaaaaccctgtggttcactgtttagactatagggcccagggaaaagccacatgaaccaagatacatttctgtggctgaattggtcttgctgctacacaagaccaaaagatgctcctggctctgcttcctttgctgtcttcctggaatgtaacttggatgcctctagtaattttgctatccagcctcgggctgccagcatctcacctcctgatgctttgacttgatcatctttgctatgcaagcttcattacttcatttgatctctcaagtatcctagcaacccaagtagaaactttatttggcatattctgttggccgttcagattgaccaccccactgggtggtctagatttctcagtgagttcccgcagtcccatctccttctgtctactctcttttctacatgggactggtgagatagttctgctccccccaccccctgcccccatacaacctcatgaaccgaacactatagataccagaagacatgtggccagatcagacaagtgggtatgccaagtagaacagcctcgtggggatgaaatccctgtgtgaaggacacacttctggaatgaacggtagaaaaaaaatcctcctaaggatgaaaaaatgcctggctcagaaaaaaaaaaatcaaaggacagaggccttagaaaaatatgattaatattctaaaaatgcatgcaagtgcatcaaagaaaactccattgacattaggaagaggttttaggagtcagatacaaaataaattcaaaataaaatatttgttagcttttctcctatgtgcgttttttaatgcatactatacagaacaaagggatcccaataataatagggtcagaatattttaagggttcaggatgaagataataataagatgtagggcctggatgaaaaagctaaagaactggacacacaaaagactggactgcccaggaaaatagcgtgtttctaaatggaagcattcagccctctcaggatgttcgttctccctcagatttctttcctatttgtgcttttgtgacctgtcagacatcattctctgtgtacatagaaaaggtgtatgccactatgaaggtaaacaactaattaatttaaaaacaaatgggttatttgcaaggtaaaaagttataaacagttctaaaatgaagtaacgccctaaacatgttatttttgtggctagtgaaatataattggagccaaccaaaaaaataaagtaggagtgatgggcgtctgcatgaagtaagagtgatgggcatctgcatgagtatttactatgtgatggctatggattgtacattagtggagaaaggattgattattaatgcaattagaaaaattggtgcttcagtggggagagtggatcattattatatgttaggaagcagaaaacaaaatgtagttggattctacacggtattggtacaggaaggtttggaagttgtaacgatgatgtttgatttttatatgtgcaaatgaattttaaaagtgtcattaaaataaaaggcccagcttctctcttccctttctggtaaagctcctcaagagactgctcatagtcgctgccgtcagtctctcagctcatgataccatgccagaccactgcagccatcgagcccctgttcccgccctccacaggaacggacacagccaaggacacagtgacctccatagctcagtatgctgccacttctctcccttgacctgtaccttctgcttccgtttcctcacttgacttctggatcgtcgctctctctttgtagtccccagagcagactgatgtcttccagtctggtttctggccctcttagagtgcacagagccacaaatgcttttatgtagctgggtagactctaccgagggcctccattgggtgcttgccttgaagtctattgtagggtgaatgcagcctccattttttatcccaagttaagctttttctcaatctatgctttgaaaaaaacaaatgccagcatgttcccttcacttgggtgtctttttagtttctccactatagcaagtatactatcaaacttataatgttcccatacccccactctgacattttctaactcccacggtgccttagtcacttttcattactacgaccaaaatacttgactgaaacagcttgagagaagaaagagttattattttgactcatggtaccagagggtcatagtccattatgatgggggagggcatcgatgtgtggcttggaccctaaagctaaaagaaaggagtgaccattgtttacatggtggcacacaggaagcaaggaacaggccagaactaagggtggttataactttctaaagcccagccctagtaatcttcttcagtcagcaaaggccacctcctaaagagtctacagccattaaaataatactgcaaatgtggggccaggtttcaaaacaagagctgttgggggaacattccagatttaattggcaacacatggtcttcattaagtaggagaaatatcaatctcatgatctgttaatataaacatataataaatattagttcttttttaaatcacaagttggcaacttatggcctaaacttgagatctaagagtttgatttttataaattatatggaaacagggctatactcgttcatttactgttatggctattttgcagagctaagtagatgcagcaaccccagaatggtttcaaagctatggattgtacagtctacctccttgctaatgtctgatgaccccaggaattatcacctaaacatctggatttggagctgaaggaatggacaaagaaagagaaagaatcttgttccctggaaccattacgattggagataattttgccttaactgggatacttttaaaattgaaattggtatttgggacaggcagtaagatatagcttcgggtgcctctaatggatcattgagaactagattggaaagaaagaagtgcatcaactaaggttagaattaatagaattaagtaaaaaaaataatagaaatcaatactggtaaagcaacagtcttcatcagtagctgggagcattaagattctttgtaactttagatactttccgtgtgaaacagtaaatcaagcagccattcgctcttcgacagtggacagaatgctatttattattcaagataatagcagggacagaaactcaagtgctccttgaattgtacaagggacagagatgtgagacaagaacaaaatgttccactctaacgagtggaaaagaacatcagaagacgggtaacatggacgtttgaaatagtgcagaatggtggacaggagggaacagctgtaattacgtaaagatctaaggaagtgtcaaggagccagtgcttgcacgtttgacttagcaatgagctagctaccaagggctctaatgaggaccaaagaggatcttacttgtgtggaatgagacctgggtaatcattacttccccttctctgaggttttgtgacatgagagaacagagtgtggaggcagatgggctacagggctgtccttctagagagctagttccaaatagctggaaggaagtgctctgaagtaaactcttggaccagcttttcagataaagtccttgagacttggagcatcttccatgtttcttggagaggaaggaccaggccatgggctgtgggttaaactgacagctcagccctgaaaggatgagcaagtttaggtgatgcctttgaggagaaagaccataagacagttgggtacatagcaagtgaataagtcagatctgacttggtgctgctggaggggatgcccaaaggctgttctcaggaagacagagtcgcagcactacttaatagaaatagctttattagttaatgaaatgattaattaatgaaatcccacctctgctatccttggcgggcctatccctcactgaataagacatagtttaccttctggttttaaattttttgccttttcagagtaggaatgtagctcagttggtagaatgcatccataaaccccagggtttgatctccagggctgcacaaagcaagcatggtgacacatgtctgtaatcctaactctgggaagataaatgcagtaaagtcagaagttggcagttatcctcatttgtatggtgaacttaaggtcaacttggaatacataagaccctgcctcaaatctgtcttggaaatgggctttccccagttttgtcgacctcaggatatgtgaggagagtcccaggatagtacctgaaaatatatgttacctgtccagatcttctcagagttagtcatactcaattctctataatgctggatctgttgattcggcttacagccctgtattgcataatgatgttttggccagtgacaggtcatatatacatgacagtgatctcctaagattatactgcttaatgatatagacatcctggttcacgtagatgtactctgtgatgtcttcacaaggatgatatcactaacaatgtatgactcagaacatgcgaccatcccatgtggtcactccaggaaactgttttatgaaacaatgagatatatttcctgtggatctctgaattcagaactagcaagagagaacatttttggaaggatgcgatgctggttgtgactgaaaaagtcagatttgctattcaggaacggtgtctcttttactttaccaattccatggatcattttggctgctagaaagactttattttttttattctgaggatagaaacactcaaggcctctttttaccctaagtcattgcctctaaaatctacacgcattctctagatgaatgtagtaggtgcatgaaatgactgagcttctagattatggcatctgtcttcaaagtccagttagccttctggtgaccagggtcaaacctacatatccaaggtgatttctggcacaaacatgtcaagatgcctacttaaaccctaaatgctttctattctgtgctgctgctgtccacgtgaccctctgaattccctctgtccttctctgtcatgttcactttatgagtcaaccttgctttcatatgacaggggactggagatgagcaggaaagtatgttattggaacttattctataaaccccttctttacctcaccttaggccaactatgtcccttgactgaaggtcacagaacctgtcaaaagaagagcattctcatcactgtcctctctaacctggagtctgttaagaattctttcagagtgtttctgtgaggtagaaattattctctgaaattcctgatgagaaaagcagggctcagagtgtaacttacttaacattatatagctcaaggctatatagtggaatcaaggttcaaactatcatggcttcaggactaatgctctgcccatcactccaactgaccgtggagatagatgtccctagcctctataattcattgtcccaactcatccaagatatgtgatcttgtaacccagctgtttactaactttgctggggttcctgtcactagaacatgctcagtgttatcatacttgggcatgatctaatttgatcttcattaaaaaatgggaggaactagagattatcttatcatagtctctattattgaagggagaaaagccaagcatggatcaggtctattgttctcttcagagtcacattgttggccaggaaaacagagagaaaagtttgcctttagctatattgccgattactgtgctagggtccccagttcctcaacttctttttaaataggcttgagatccggggcagtggcatggaaaagaaagggagaaaaagcaggcattgcacccttcttggaacccatccccagacttgtatgtgtcctcatcaaggctctccagagcttatcacttcctatgtagcaagaggggtgctcagggtcctggtgagcacacagagacctcagaaaaattaattatccaaatgctttattttgttcattcacgcctttatggaccctctatcctcagttggcttgtatggtgagttctatattaaatcagggtgatactcctgtgcccccaagaggctgggatagctggggctattgctgtaataccttgattgcaaagggggaaggagccctgctacctttcccttgaggaacatctaatccttccctgactggccttgctgctgcggaagcctttgccccagctgcacatctgcttctgtaatgcgttttgttgatctctcctgagagggggtgctcaccataaggaaggtgtttcattaggtcttaataaatcctgtatgtgcagcctggcctacctctcccccatggagctgctttctgcatgaggcagggagaggtggatgattcagacacaatttgcattggcagcaggaatattatttttgcattataaagcacagtgggtgaccttatcaaagctggaggaagtgagcagacagcaagagaacaggtgtccacagtaacaagtgacaccctgaggctggatactggcagggggggatggtgagaagatgctgagtccctctgccaccttgtgctaggacaggggttgcagaatgttcagtcttctcggtagaaactcaggaaacagcccaaagtttggggggcaatggggacacggaagaatcagccctccgggtggatcaaagctcagaatgagcctcaaacagcacatggtatccttgctgtggaatccctataaacataggtgtgaggtcttgctcggattggtgacttaaagaatgagtgattggacaaatttaagaatgtctgagtgtgaaggaagcaccggatacatcagaggtactaagaacagtacattttggggaggaaggatgttgaagtcaacgttaacatatagagtattgaggctgtatggacccacagctagaggaaagtgctatggtaacccctattgaccagcatagttccagacaggcccttcccccaccacagggggctacgaagttggtttcctgccaggcactttggaggttccaaagaagaagaaaccattgacacttcagaactcactggtcctggggatgctccctggaagtcacccaggccaagtagataactaacccttgtagaaaagccctccattcaaggggcaaaggcgatgctttggaggcagcggctgctttggcacagactcatctctgagatgagctcatccgaggcctcactttccttgtcactctctttggatcttacagtctcctcccagggacctgtactcttttatttaaaccagagaaaagtgggatatttaaaaatactattatttctatcactgtttctgccatttcccctactatttgtgccattacagcagctgctgaaaaacaagtaaatgaagaatttatcatttgcattgcagtgctaagtgttggcattcagaatactaggcattcagccatgcacttatctgaatgcctgcactcacctgcatgttagctgctgtcctggcctcagggtgtgtatttgataccactgttctagtttgaggattcaagattcatcttcttgaattgtcttcctcctcatctcctctgattggggcaaacacaggggattgacctcaccggctgcttggctgtgtttctaagattttcaaatgtgatgcacattttttttttctggccagttaaagggtattctctttgaggaaagagaaactctcttgggtcactatggaggagtggtacgcatctgagtctctcctgttttgttctttttaagagcatggcatctgaagtctggggaggtggatcaatcagtaaagtgtttgtcttacaagggaaagtactgtgtttaatccccagaatttttgtggaaaacctggggacagtccaggctctgaggaagagggggtgagtgaattcctaggcccatgggtcaggcagcattcttacttggaaagccccagaccagtgagatctatctctcaatagatgattgattgggataaataagatagatagatagatagatagatagatagatagatagatagatacatacatacatacatacatacatacatacatacatacatgatattgatattacaagaagaatgatacagggacacctgaggatattgtctaacctccatactgatatgcatacatgtgcaaatgcactccacatacatattcaccaattcaggtttataagcatgtatatgtgtgttcacacacatatactcacataaacgcacacacactttccccactctttctctctcccccactctcagtatccagcattgagcacagagatgattttaacctgagtctgaagtgtccctgcctccctgggagctgcagccaggggaatgccttgtttcatccatacttacaaactgctcagactcctctcactctaccccttcccaaatgatgcagatcacaccggctacagcccctatatttctcagctttggacttagggcatcatctgtggtcaccttcgccaagtgtttgcaaatatgacaacttgagatactcccatcagtcatgtttacctgcgttatgctgctcatccatctagacttgctatttaaaaaaaaaaaaaaggtcttttttttttttggagatattttttgacaggcttctgctttggggtcgctgcccagagaggctgtgtggtcagagcatagagtctgaagaacaaaggccctcaggatgctgcagaaccatactcaccctgagactgtgccagccataaaggcaccgtgccaagtgagatgtacagtccgtaattgcttatttatatcctgtctgggatcgcttatcatgaaatagctgtggctatagtttattttccagacctctttagagaaccaaagttcattacactctggaagaagaatggcacttaaaaacaaacaaacaaacaaacaaacaaacaacaggaagtttctttgactggaaacctactatgcaggtggagtccttgaaatcgagatagaagtataatagcctgtccagcatcacatgaggcctaattaggtgggctttcctgaccccagcttatacaattgagctgctcagctaccgtgtagggactcacacaggctctttattttcacacaccttctcacatttggggattgttcttggtgcaggcttcttacaaaccacttccaacataagcaaggaaggaacctgggaatcctaaagccctttcattacaccaggctgctttggaagaatgtgggacgtcacttattctgaggatttctctaacaacgagtctttatggtatggtgatctgtgctaaatcttaagagttgtagaattaaaaaataacataacatggtgattagagtgagtttgggaattagagaataaggagactgaatcgtgttgaggactactgaccacttataacacagaagatagagtcactcaggctaaactatagtgtttatggagactcttgaatcttggtgtaggtagaattttttccctatgctcattcataagtatttaattgtccaggactagccattaggcaagatatctacatgcatattattatttcttacactatgctacagattcatgaactagatccagggatacatcttcttacacaaagtgagaaatccaaaagcaatggacagagacaatggtcttttatcaagttcaatgctaaattcatttggctgtgaaatctgacccaaacagaagtctagctgtgtgtattcctcacttacctcacatcatagtgagtttttgtgtgaaaatatgtatgtgagtttgaatgtcttagattctatacggtggtacaagtatctttatcatctgtctataaacctgaactgtttccaattctgaaacaccacttgtcacttgtcctgagggttttgattagaaatgatggtgtggactagaatctgtgtttcacagcttcacaggaagttcagtgacatgcctcaggacacttagcccaggaatggcacagataactctagatgcatgtatagtttgaagggttttgatccattcattcctggtggcagaatatctgacctgtgatgttatttattaagaggcaggcgccaagcctgaagaagtaagaagagatgtctactttgtgcttagggtcccacctgagagtaggagtctgaattttccatccacatggatactaacatgaacatcaagagtaatccctcaactgctcgcttccctcaatccccagtacccaggcttggcagtttcctgtgaatgtttcttcttctcacttcttggtattatttcttctcctttcttccttcttctttcttctttcttctttcttctttcttctttcttctttcttctttcttctttcttcttctccttctccttctcctctcctcctcctcctccttcttctccttcttctccttcttctcctccttctcctccttctcctccttccctccttctcctccttttcctcctcctcctcctcctcctccttctcctgcaccatcaccatcaccatcactatcaccatcacctcgatatcatttcaaactactctatgtctctgcttggcctctccacttctgtctgcacatagcgaatggaaagatcttaaaaacaacttctgatagtgctgttgacatctgaatgtgaaatgttctccataggcttgtgcatttgaacactctgtctccagcaggtggtgctgtttgggaaggatgcggacccatcaagagatggatgcttgctagaggtggttggtcttgaggttttatagccccattttctctccttccttcttatgggtgcagtatgactagcagccacctgcttctgccggcatgctttcctcttaggatggatttgactcccagaaccacaaggaaaaggaaaccctatctcccctaagttgattcctgtcaggtattgtgtcaaaaccccaaaatccaggaaaagtaaataaagtaaatgtctaataattttcatgctttttccatttcttttaaacacattgagaatcctcaacatactttggagttctgcatcaattgtgggctgagcccctgccatcaaagtgtcagatttatcctgaagatggaaggaccatcttgtgtatgttaccttgactctactctaggaattttgcacatgtagtcaattgaggatattctctttcttccttctgcctagacaacccaagacccatctcattctttaactcgtagctcaaattccccaactttgggcttcctctgtcaaatgatcttacagtcttttttttttttttttaattttaatggatcaaaccacaaacttcagttatgtgtttattggtattgtaattgatggaagcctggtacttgcccataacccttactaaatcattttcttaactctcatattcctgaacctcacacaatatctggcattccctaggtgttaaatgatcattggaagaattcctagctagggaatcaacgtatgacaggctaggttttgtgatatcatagaacttttttttattgagtgtgatttgtatgtaacaaagctggaaccacaatctagcactatttctcccaagccccacgggctctctgcttactgctctctgctggtggtatccctggggtttctctggcaccaagattggtctcttgtctcccagaaaaagtgaatgccttattctccagaaacgcatgagcttctctgtcctggccacttacattgatgagcacaatgaggcttctctatggcccctcctcgttcttccccgtccttccctttcaccccttgcagattgtgtgagagaatttactgacgtatcaacaaagtgccagtatgacgaggcatgtggcaacatactatctgtcaagaatggggaggaaaagggattcttgttcattcccggtgggggcataaatttgtgtagccactgggaatggtagaattctcatatgacttagcctttccagatctcattatcccaagagagcccaagcctgtatagatatagttgtctctgctcatgcctgatcattgctgtatgcatcataacgaccaagacaaggaaacagcctagatgttcattagcataggaatatagaaattgaggtacctatacagaacagggttctattcggctgtgaagaaacaatgtcctttgcacattgttttcaaagccttcagaaagatatatttttcaactataggatacttgtgccaatgagggagaaaatcacacaggtgggcagtgacactgttgaggtctgacctgaatatgagtcttcaaggtgacatcccagaggcaggagatgtgagaaggactctcagcctctcagtgttgaatgtgaaggtgggggtaagagagagctccatggtctattatgccacataatacaattaacttaatacctatttttggtcaggtattgtaataggcttcagcttatatatggtccctagactaaataattagctgaccttagttgtaagtgttatgaagaaaacaagtacttaccaaagcaaagttgctagctgcaggtgcaggtgtcaggggatagactgccccttgtataccccctgtcgagtggggtgagtggcttagatgccccccgggcccgagtggaaagcatctggcagccctcccacatctgcctacccagagcataggtggaactctggctggatatgggctatcctccctccccactctttgccctgcccccctttttagttcccacaacttactttcagggttggggacgctaaggatcaacagggttctgggcatacccagatgggctcctaaaggccatttgcatgtgagatgcctccagccatcccaccccccccaaaaggaagtgcatcttggttatattgccactatctgtacaactctgagcaatcccatacttacagtgggtcttagcctcccattatgacatgggcagaggagaaggaaagagagctggctctcacttattccaagaagttcctgtcccaggataaaatgaatagcactgtcattcaatctggcctcagcctccctgggttcaaatcccacgtttcatagtctttaccaactaacactggacagattgcctgggctttctgtgctgcggtttctttatgctttaatatacagatggtaatagttaattcttcatttctgaggattaaatgaaattgtgaacataaaatgtctggcaatacgccacagatgcagcaagtgtctaataaacattagctgttgtcatctaattatttgctaatcgctctagatataaaggaggctttattgtcctggttttatgggtgagaaatctgccaaaaggtgttgaaattagtgtcaggaagtaaatggctgaccagggaatcaaacctgggaccattttgttccaaggctctgctcttccacgggtgtttctctcagtttctgacccacaaccctgaaaaccagcttgactgtgcccagatctcagcatggccttgagctccccttacgatgccatctttcctttccatattttgtttggctctgcgttaccagttatggaagatgtcagacggatcagcttctaacatgggaaccctttgtatgaaatagaagcatccacgtactttttatttaacagcagaaatacacaggccaggaacaggccctgatgtctcagcagccatttacactgtttggggagcctgtactgaggtaatatatcaaaccgcctgtggaccatgccacagtggaagtaggcctggccacaggagctgtctgcagaagcagcccctggcctctggaccaggcagtagtaaccgaaggtaactgtttctgatggggattatggtgagagacctctatggtggattcagtttcttggaatgaaattctagaggtagaaggagatagctgaactcaagccatcatgtagagctgaaaagaagaggccaaaagggcaaagggcagggctggtactgtcccaggctcttgttttgcatgggagattgtaagagccagttttccaatgtgtcgtcttaggggaaattttgctctgtgttcccaatccctctttccaaatacagctctcatccttaataaaacacggcttttcctgtggtttatttcatattaggtttgttgtgaccgagatgaattgtttgtgtgtgtgtgcgtgtatgtgtgtgtgtttcaggatacttgtgtgtttatgtacaagtgtgagcatacacgtggaagccacacaacaacctctccatgtgtctctaccttgccagctctgggattataggagtgtgtcaccacccccaacttctttaattccttttcttgtcttcctctcccctccgttcccccctacacttcctcttttactactttacccatatcccacctttccttcctcatgggttctgtggaatgaacatattctcccatccttgcaaggcaagctgtttactgactgagccatgccctagtccaactgtttctttgaggcctgtggtgaagaaaagataacagggagaaaatcaaagcgctcatctcaggcagccaggtcacagggagaaggggctggggacacacccccagggacaaacttcttcacctgggcctcacctctgaaagactgttatgagttcatagatacactaatttgctagatagttcagagcccttgtgatccagtccctcccccaaatctcatcaactggcaagctaacctttaacacaccatcctgttagaagacactttatatccatagtgttcccaattaagacgatggggtatggtggttagaatggcagtggccccatagactcatacgtttgagtgccttgttgaagtagacatgactttatggaaggatgtgtgtcactgtgggggcaagctttgaagtctcctatgttcaagctattcccaaggtggaacacagttgcttctgctacctgtggatcaagatgtagaactctcagctccttttcccacctgcctgcctgccgtgtctgccagtcttcatgcttactgctatcacgataatggactaaacctcagaaactgtaagccagcctctattaaatatttgcctttctaagagttgccatggtcatgttgtctcttcacagcaaaggaaaacacaactaaggcaaggagaaacatttttctattctatatcacatattatgtcttattgttcttgtttttatgcatttctcaaattcactccatccctccatccctccctctctccctcctcttttccacccctccctctccctccttctctctgtcccttcctccctcctcccctcccttcttttctcccttcttcctttcttcccatcctattcatttccatgttctgatcagttccctcaaatttatcttctaagacatctattgtgtttttattatgctcttacattttgacatgggtgagttctcttgattctcttgatgcccctttcttatgcatcattagcattcttgtgcttatccccgcctctttctttcatgttaaagaggtgctgggtccttggtgtctctggatgcctattcttacttaaagagggggctcagcatgtggaaagtgtgggctgagagagaagcttatttcctgacagatggactgcacagaggtgatgaagacctcactgaggccttcatggtatttgtacttgagatctattctgctttacttcagtttccaaagagatacaaccgctgttctactaagggcacagggagatatattaggaggctggcccagggactgtcagacaaggagctacttttgacacagtgtgttgtttcctgtgggtcaccacccctggctttgtatggcactgcccacagcaagtcataaagtcaaccatacaagattccctctgttagatctgcttctatggttaaatcctcactctcacctaggaagagaggaagagagaaaggattatattctggatgcttggcaggggaattatattaacagggttttatataattcttttgggtcctatgcccatacccacccctgccaggcattggaatctggtgtccccaatttctagttctttctagagttctgttgagttggctcccttctgctcctcagtgttggcgctccccacccagcctgactggctactgtttttcttcaccccaaaatgatagcatctctttgtttctttgtttcggctgattgctttctgcctcccatgcacatgtaagcttatgtttttgcaactcctacactgctcttttagtgagaacggaagagaaaatggagcttaatgtgtgtgattaatctattatagttaattggaagctgatctttcctcaaccttttttccatcaaccttgatataactgttcctatacatcatcttttacatttgtgtaccttactacctttgtttaatatatatatatatatgtgtgtgtgtgtatgtgtatatatatgtgtgtatatatatatatatgtatatatgaatgatatatattcgtaaaactgagaaaactctaacggttagggtttcattcttttctctcctttggattctactcatgtttcccatcatgtagtacttttagtgactgaacattttcatctttatattacagtacgttgctacactataaattattgaatcacatctttaccccagggaatccaaactaattcctgccttatagcgttataaataattttgttttgagaagtttcatgcaaatctttgttggtgtttttagctcgctttctaagttgggattgtccgttttgcaaagtgagtattttgacagaatctgactcatactgtgataaggaatatgatagatgtcaaattacctctcaataaatacttttgtcagtatgtaatccaaacatccagagactactcatgggatgtttgccaacatttagaattatccctgttgtaaaatctactaatttgataagaggaaatgataccacatactgacttgaattttcttttctactcgtgcagatgaacaaaaacacaatgtatttttatgtgtgtgcgtgcatgcatgcatgtgtgtgtgttcatgtgtgcatgattatgtggacatgagcacatgcatgtgtgcatgtgtctatatgcatgtgcttgtgatgcatggatgcacatgtatgtgtgcatacctgtttgtatatgtaggcatatgtgtgcatgtgcatgcccatgtgtatgtgtgtgttgtgtgtgtgtgtgtgcgtgtgtgtgtgtgtgtgtgtgtgtgtgtgtgtgtgtgtgtgttagggtggacagtgtacatgtcacagtagatgtgtggaggtcagaggacaacttcacaagtattggtactcatcttgctacttgtttgtgacagatattcacactctgtgggccaggctagtgcgagctttcactgtttttcttgccactgcctccggaataaagggatgggctactagagtggtccagctttattacttctgagactccagattctgttcctcacacatgtgtgagcagtgttttatgccctgagccatcactccagttctcataccagtgtattttagaaatgtcctctaaagtttcttttcctcaatactttataacttccatcatgtttataagttctttctaaaaggaaatcatactctacttgctaattattataaagtctattttcctagtttttatttgcttcagattttttgatgtctctgatgaataattttaacttttatgttgtccataataaaagtactttgtattttcctttgcttcttgtttttaaaatttatttctgtatcccttaaagggtaaatatcctcatagattttttttctccattaaatgatttttaaaattcttctttatgttcagctctttattctttgtatttgtatgctggctgataaactaattaatatttggtcctcaattcactctttttcagatgattacacaaggataattctagcccagtattcctctgctctcttgaagtgggtttcttcttattaggccctgttcctccttgactgttcttggcatcattactttctctgttcttatcttagcagaggattctttgaataactacaactttacagggcatttgatgcttacaagaaggatcctttctccttatgcttcactgggacagaagtatcgtcctcagcatctcctttcaggtgacctttagaattatctgaaaaattccagaagattctttggtcacgtggcaagcactgtacagattattgttatgtgtgtgagaatttccatctggttgagtggagtcttcacattcagggtcattgtaggggcatgtctctttacttttctaaagttccttttatgccccttagtagtttttggggtctctttgtctggtcctcacctgtctcctttaaagctgcttgcgatgtatttgccactattgtgatttaatttatttcctgttaggatctgcaagtggctactgctgctacaggagaaagctcttgtgtttgcctgtttatttttaaagctcttatcttactggattctgtccacaactcttgaggtctttgggtaggaggactgggatttctcagtattcacaacccaatgggccaaacacaaaatgtacttttatctcctgcatttttttattacatttcttcctcatcttttcttgcctccctccctgttttaattccattgcttagaattgtaaatctatgcgaatgctattggcataaccttgttgtgttcaagaatttaattgaaatgcatgacttgtctgactcctgtgcttggtcttgtcctttggtttcctatggacacggtggtattccaaggttgttgttttctcattctagaatgctcatttctttaaagcctagactatggaaatatttctttttccccaaagcctcttttgcagcaataggttggacattgtttctcttactgtgttcctgctaaaattgtccaacatagaaattcatattaactttgcaaacagtcttcacattcctagaataagtatgatgactacccatatactcctttttcacactgtgataaatttactttaattcaggaatcattgtttgtatacataaccataagtcagtttgttcaatggtttcatattttatttcatataaaattaccaagcttgttaaaggagagaaaagaaaagaaagaaaaaaaaaagaaaaggaaatgagcgtagctctgaaacagcgtgtaaaggcgtgtgttgaaaggccaccgtccgctgctcagcttctctgcgccaagcccactctcataggccatccgtttctatttctgtttgttctgagggctgtctctgcatgtgtaaataatttgcttaaagtgcttttcttgacttgttgatttaaggcgtctatgactttctgggaagagaaagggatttgttcttttcagtcactctctgcctcccattgtattgagatttcacattctctgcctcggcctggcaatcttttctttcacattcacatggtatttttaacctggtctaggaacgggtgtgttctgagactgggaagaagccattggtggccacctctgcttgtctccttcctttctgttgcttgcttaacgcttgtggtcagtgtttgcaatttctagatgtttccttgtaattcttcttgtcattcatgactgactagtctcctggttctgaaagtggagtattcataagtccctcttacatcattattcctgggtaggtactctgcagtgtgctaggaccctgacttgccctcttctggattcagatgtactttcagtatttctcaagggagcctgctcctcacttcaggttcaatggctgctcttttgtccaaagcctatgatttccttttataatactctctgaactattgctaatcatctttgatacccactccactcacagctttatcccatggaattagatttgcctctcaccttttcttatgatcccagagctatctgtcttaccaattgaatcattgcaagacactctttgtggttgccatttgacacatgtattttttacatgttagctttagtgacctgagacggacaagggaagtgttttttgttttgcttttgtttgtatgtgtttcctgtcacccttaagcccagaagcatttctgctttcagacgcttgtttagaggcttgaaaaaaccctagtattagttttgtttctacatctcaggctggccttgagctaataatcttcctgcctcaatgtcccaagtagtgggatttagacatgatacatccctgtgtctctttgtaaaacaccttagtactaaagtgatagaagcccaataaataggtatttcaattaaacaattatcaagtaaatgactaagaaagtttacatgggaagtaaattctttaagattatattgctccaaatatttgaattagatttgcttatttgaggggtatataaattttttttatgattttttaaacttaccaagcagaatgggttttatagccccctgcctgcttttcgaactaagttctcttgtagcttaggcttgctgttacagtttgtgtatgctaggcccagggagtggctgtaagccagcaccaattaaatgttgtcattataagagttgccttggtcatggtgtctgttcacagcagtaaaaccctaactaagacactggcttcagagctgctatgttgtcaaggatgatagtgaactcctggtccttctgtatctaaatcccaagtgctgggatgcctgttatgactctcacctttcattataacacgttgatgtctatctgcttaagtggatgaatgcttgctccttcgtctccccatccttgcacatgccagtccctcacacttacactttttattctcctttctcccagctggttcctcatttgtttttgctggtatattgatcaatcaagaggtatattttatatgtgagaaaaattgcacgattctaccttaccctcccctccattacccttggtgtttctctcttccctttgtccccttcctccctctcacgatcactagacttctactttcatatccaccacccctaccctgaatgcaccccatgtaaaggtcagagggcatcttgtaggcgttgattctcccctttcatcacgtgagtttgacaagccaagcccaggcttagcaacaagtgcctttgtctaggctaccgtctccttgcctcttctactatcttagtcttttgaggcagggctttttgatcaaacccagagctaacctatatgaccaaatttctctggtgatattttttgtatccaaacaccaatcctttttcctgctaagcaagattctgagatactgtcatagtcttgaaactctcttatctttaattcatctcttgacagacatctacactggttctatatatcagccactgtaaatattgtagtaatacatatggatgtgcaagtatctatgtagcatacctagttagatgcctttagttttataacaaatagtatactatattgacagatagctatatcacatggtagtcctggttacagatttcagcagacaatctggaccttttgtcacagtggttatactagtgcatccacccaccccactgggtgagactccaatttctttatatgctccccagcttttcatttgttctattgatgatgaaaactattctgactggtgtatactggaatttcagtgacgtttgaatttgcattttctctgatggaaaggtgtgttaaacaaaccttcataagtttattggcttattgtcttcagtcttttgagaactgtctattagttgatttgccaatttattgttggatgatacatgggtagttttgtgtgtgtatttgtcttggtgcttaatattttcagcagttctttatggagcctagatattaattttccatcagaagttatatgctgtatctcacctatttattgcatttatggaacaatctttatattcctgtaatgaaaccaacttgatcttggtgtatgtccatgaattagtttcctaagatttaaaaaatattttatttttctgtataatacatcctaatagcagcctctccttccttccctcctctcagcaccccctacctcctcccccagatccactgctcctctgtttacccttcagaaaagagcagacctcccaatgatatcaactgaactcagatacaagaacaagatacagtacacctagatatagtccctcatatcaaggctgggctgggcaatcctgaatgcagcaggaggtttctggatagtattactcagctgttagggaaagaatgacatcatgaaatttgcaggaaaatggatggaactagaaaaaaattatcctgagtaaggcaactcagacctagaagggcaaacatggtatggtttctaagtattttactgagagtgttgtttctacattcatcaaggtaataggtccataggtttctttgttgttgttgtcgtcattgttgttgtgttcttactgggatttttatcagagtaatattggcttcatagaatgcctctgttagtgttttatctctttctaattcatggaatcaagaaatctgagaagcactggtgctagcttctttcaaagcttgaggaaattttggcagtcaatcttggacctttctttgtcacaagctattactgctttaatcctatttcttattatggatctacttcattcatatatatatatatatatatatatatatatatatatatcctcttgaattaagtttggtaggtttaatgtgcctaggaatttattaatttcttttggatttcccagtttccaaaactataaattttcaaaggattccatgatgatacttggatttcatcagcatatttctgcaacatttccctttaaatccttaattttatttatttgagtatcccctgtttcttttgcttagtttggctaatggtgtgtcaatcttacttaatttctcaaagagccaaagcctttgcttcattgcctctgtgtttttctttcagtctgcacttcattaatttccgctctgatcgttattacttctttctccccactgctttgggcttcctcttgtttttgtttttctaagaccttgaggtccataattaagttatttatttgaactctccatgattgctttcatatgggcccatatagctcttagcatccctcttacagctccccttgctggttcctcagaagctctgctcagtgatgtttccatttccccttgattttggaatttttaaatctcttctttaatttcctcactggtgtacagtcaagagtatactgctcatctgctcactctttcatggcttctcttgctattgatttgtagtttcatcccctttgattgaacaagatataagaaattactttgattcatttgttcttattcagagttgctgtattccttagaatgtgatacattttagagaaagttccatgggatgctgagaggaatgtccattcctcagttgctggattgaatgttctgtagatgtctgttaagtccttttgaactatgctgctattaaactttgatatttctttgctggttttatttatttatttatttatttatttatttttactagttgacccacttattaattaaagtatgatactgaagccactccacattattatatcaggacccctatttgtctctacataaccattagtgtttggtttatagaattgggatccccaatatttggcatatatttatttgcaatcattatatacattactgatacatcattctcattgtgtagtgttattttgaatgtagttatcttttgagtaattttggtttgatgcctccttcagatatcagaacagctacataaggttagtttgggctttcatgtgtttagtacattgacttctgcctttccaccctcattctgtatggtctttgccagtgatggctgtttcttggagacaacaggtatttgcatcttattgattaatccaatcagctgatctccatcttttacttggagagttaagaccttttatgtttaggggttgttattgacagagttttggtcagtcttgcttttgtgttggctgcattaggttagatacgatttgttctcttacttctctattcatgtgtaatttttttataccttactattctgggcatgatgactttatcctatttttcatttattcatccattatcatgaaatgttgtagtgggttggtctgatgctgcttatattctaatgctatatactggttatttaaaatgttgtctctgctgcccctgactcaaggtgataggatgtgaactttctgcccaatttaactggtcagtaaaaggctagaacctgtgattgggcagtggagggaggaaggtgggactggaggttcaagggagtggggtgcggggagaaagagggagaggaagcctgaggagcaggaagctgagatggaccagaatcacgtggtcaggagaaacagcaagtaacgacggactttatagctgggaaataagttagtatagccctacatctgcccaatctaggcttatggcttataaataaaatacctagattgtgtgtctttatatgtgcttgttaagattataaaatctttctataaaagtgtactttcttatactcttatgacagaggatttcttctttttccacgttttgggtgtctttaagtatcttctaccttgctatacatttctgtactttctatttgtcttggaatgtctttattttctccacagatttaaaagacaactttcttgtggatagtcttggttgagggcttacttacctccaaggctttaaatacattattccatgctttcttgactttcaggcttctgttgtaaggtctcatgttattctgatgtgcttccttttgtaagtgagtaaaagcattttttcttacgctgtttattgtgtttgtagttttgacatcttgactacagtgtgtcagggagaggtcttttgtggctgtgcctgtttggacttctttgtttcttgcaccttgttgtccatttcccccttagaatcataatttttcctgttagagtttcctggatatattttctacatttttagctttccaactcggctcctactccatgtattcataggcttggattctttatcacattctcgtgttctcgggtactgtggtcatggtcatctgtttattgttcattactgatctctgttataattgcttttctcttgatgtggtaaataccatgaccaaaacactcagggagaaaggggtcattttttccctacagattagagtttatcatttagggaagccagggcagacagaagctcaagcaggatctgcaggcaggcactgtagtggccagcatggaggaaggccacttgttggtttctttcccagcttgctcagcggcctttctcaaacaccccaggcccacctgcccaggaatgtctgtgtccacaaggctctctcgtgtatcaataaaataagcaatgatgaagacacccccacaaatacatcctcagtccagacttgtaaaagaaagttgtcagttgatattctctcttctcaggcgtgtgtagatttgtatcaagaacgaaccagaataaaagctcgtggtgcagaatttattgcttttgtcctgggtgagagggagaaagtatgtatttcagagcacagagatgaatgttaacgtaatcacttgtattttttaaaaaaatcagtattatctaatagtacactggcttcaacttatcttatttgtggttgtgtatatgcgcatacccgcagcatatgttatatatgcctgcagcatatgctatatacctgcagaggccagaaggctctgaatccctttggagctggagtttccggtggcttggagccacctgacatgggtgctgggacctaattctggttccttacgagagtcacaagagctttcaacatgtactccatttcctggccctacactggttttgaaagcccttcccttttcggagtcaacagttgattaagcttactgttttattccttagttgtctcttctttctctgcttaaatatgaaaaagaacgaatcctcactcccagatctacccaaacattggcatccttaattccatatcttttttatgaggacaaaggcctttgatggggagtaccaagttcctgtgaaaggtgtgagggtacttcttaacgcacaaggtccatccccaagatgacttcttgtgagcagtggaccttacataagattctaagtacagagttcctgtggtcctcacttcctggggaagcacagccttggcctccttctgtttctgtaacagtaatggatgatgtggttcctaggattttatgaagtgctaatgtagcataatcccgtgaatcagaaaatgacatttattattatatagtaacagatcattcattcacagccaaaattattgcaaacttattcttcatctaaaatgtgaaagctcgcacagcaatttacatagattaagtatgaagtagttttattgttgcagaaaaactttgagtttagtactgtatttattattaccccaaattatatgtgaaaacacatttcagaaattcaggttgagctctttaatagaatcctcaccagagacttctcaaagcatagaataaagaactcccaaataagaaaacataagtaaataaaatttaccctaagatctaaacaaaggaaataaataaatgtgaaatttaaacaccagtaagtaaggaaagaaactaagaataatgtagtaaggtggagagatgagtgaaggtttttaactcctcattcctgaatcctaagatttcttcctactgcagtggtcttcaacctgtgggtcatgatccctttggaggtcaaacaaagcctctccaggggtcacccaagaccatcagaaaacacagatatttatattatgattacattatgtaatagtagtgaacttacagtaatgaagaaacaacaaagtgattttatggttgagagtcagcacaacatgaagtactatatgtattaaatgtcacagcattaggaagggtgagaaccactgacttagaggaaaccaaattcaccgaatacttatctttcccctcatctgattgaaaatacaaaaaatggcataggttgtgggaagtataactataaaaagtgaagttaggctatatagacagttaactttctttaatttagccaaatgttcaaggatgtctattagattggataaatatataaaagtaggggctacttcattatagaagaataaatatgtacaaataggtgcagttaatctgaatgctgaatatttgttgcacagactctaggaagaaacaattgataccttgtattccaacaattaaatgtcacctcgctggactttcctttcttacaattccatcaggtctcaggaatcaggcagcacaatatatatttagacacacacacacacacacacacgcacacacacacacacacacacacacacacttttcaagcagctttgaggaaaaaaaaaacaaattgttccctaatttagtggcagtggagtcagtcactccccatgtgactgacttcccataccataaaaataaaatcaaaagtttggctggaaccacacaagcagagtcatgtggtcagaaggagagaaaggccatgacaacataagagcacaccacaaaccaaaacagcagcacagcgaggccaggaaagagagagaaaaacacggaagcaggtgagcaggggtagctctgccagagcggtgattttaacctagaaagacataatacattgaggctgggaagtaaaagattcacagccactttgctctattaaacagcgctgaataaacaggttgataaagcccaaggatgaagctgcaaacggacagaatgagattaatagggacaaagattgtgcattagcaggagtacagataccacaagtaaattcacggcagtaaaaactaaaaattaagagagaacaggaaagacacacgtctgggggaacagcagagtggagggtctggacaggtctaagaatgccaagggagaagagatgaggtgactgaggggtaaataagatgatgaggaagaaagaaggcttagtccatgcatgcacatatgacatctacatcatgctgatgccatgaatgctgtctgtgtacacacacacagctaacattgtattcattcaaatacattatagcaaaatattgattaagccaaacttgtttgttgggttgtctaggcagcagacatattttagaggttttcctgtacttaagttttcacagcagttcgaggccaatataattaatatttctgacttgccgattaaggagttaggcacagctaagtgccttagctagggtaatgtagcaagtatagacagcagaactgggattcagaaaagtggaactcactactcagcttgtaatcggaaaagaaattcctaaagtaaccaagtttcccaatgttgttttaaaacaaaatcccaaatgttcaatttaccaaatgaagactcgggagtcagaagctgtggtgaaaatcacacacagagggagagaaagcacccatctgaccttcctactccactgatgtaaataccttttaactcaaagtccctcctttctctctcctgggttttcttctgttcactccctgtcaactggttgcttgctccacctcttgacccatcattgactttatttagctcttgtttacagaaacaattaaaggtgtgtgctaaggctgagccactggactggctgggttttgtgtgtcagcttgaaacaagctggagttatcacagagaaaggagcctcctttgaggaaataatcccatgacatctagctttaaggcattttctcaattagtgatcaagggtgggtagtgccatgactgggctcgtagtcctgggttctataagaaagtaagctgagcaagctaagggaagcaatctaataaacagcatcccttcaaggcttctgcatcagttcctgccttcaggttccttccctgtgtgaattccagttctgatttcctttggtgatgaacagcaatgttgaagtgtaaatggaataaaccctttcctctccaacttgcttcttggtcatgatgttttgtgcaggaatggaaaccctaactaaaacagccatactacaactacttgtttacagtaaacacaaagctctgggatgaaggtgtgtgctagggctgagccacaccacaaggtttttctagttcacaatcttggaattcacaatgggatcaaatatcctgcaacattccaaaatgaagaaagtctgttgccagcagtcacactattgtattcactcattggcaatgaattagaggaccagcctctttccatcttcccaacaattaatttttgtctttaacaatatgattttacttagaagaaaaatagagactacagtcaggcattggttacactgtttgggtggtgacacgtgaatgctcagagctcactgatcagtcagcttagacaaaattgtgagctgccagtcagtgggagagcccatctcaaggcaataagatgcggaataataaaggaaggcatccaatctcctgatctggcttctgcatactcacacttggatgtacacaactgtacactcacatatgtatgccacacacacacacacacacaagatatatagagaatacgaagatactaagaaacagaatatagattattagttaccagacttgggaaggaagaatgtaaacttgatgcttagtggtcacagaatttctcttttgaggggttgaagatattttggaaatagactatcctgaaagcggcacaggacagcagtgttgcagaatccttcacttgaacttaattaagatggtaaattttatgttataatttttagaagaataataagaaaatatacactagaaaacattggtcctgaatgctgtctaggcagtgaggcacagcctgcttaagttgttaaaccctgggataaagagttggattttttttctagacacaaaacattctgtataaaaagagaggtatgtggtggggagtgtcagctggtttcagaaatctttaaggcaccatttggtcttagaagatagatgttacctaaaagatttgaaagaaagaaaacacagttcaagagtatcacagaatagaaggctgagaggtaattgtcttcacgggtaaatgtatttgagtactataaaatgcagggcatcttgaaaaagataaattaatcacaagtccaactaattaagagtgagtaaaaataaagattaatggatgcagagctcagggttcaaggattgaaggtttggagtgaatctatataaatatggaactaagtgtgattaaattttgcagttgcagttatagatcaggaatgaaggttatatacccaatcactagaacataagtagccgttggtacccaacactcatcagtttggaggaaacttagaggaagagggaaaataatgcgaacacccttcacatcatggagccatgaacagtctctaaaattaaaacaaatagctaagaatacattgttccttcaagttctcagtgtctgttcacactctgttctcaaacgtgagtaaatcttttgcttaaggcacatccacaggtctacatttctttcagtcctatttctgtttcccttttcttgtgtccaaacaaagaggatatttatcccatgtttgttatttatttatttttattcttttgccatctaccatgcatctatctatctctgtatatatcagaagatatttaagatgatttttgccatatgttaatgatagttatttctggatggtgagactgggaaaattttttttgtaacttgaattttgtacttctttgcattttttgagttcttcaaaatgaatatgtatcatttttcacaataacaataaagtgatctttctttaaaaataaaaagtcaaagcaaatatgtcaagatgttcacagtggtttaatcctagttggtagaactgtgggtgtttatgattttattctttgtagttttcctattttctgacagttttaatttattaaaatgtacaaagaattaagagagggaaaaaagtgaagtgcaaacagactcatgctaagttatacagtcagcgagtgttgaaactgtgattcaaacataaattcaggcaaattgagatgggttagctgggacacttgccaaagtagaaagcagcaatggagacctactgtcgtggaagtcttcctgatggagctacaatccctttgtagaagaggccagtgcttcagtggtgggtgaattacttctatctaagactcaacttttgattaaaatactgaaaggccatggaggggtctggacacccctgccctgtagactgtatatttgactgatggaggtctgctggcaacagatgttgtttcatagacatagataggctttggctctggcagctacttttgaggctctccgttgccttcctgtgtatgagtaggactgaatgtattcttatccttaaatgaactaagtcaggatccaaatccagaacagacccaggagacttgatacatgggtgtttaattcaggcttccatgcacttatagctggccagggtcttcaacttgctctctagttcagaatcatttcagcataccggtggatcaggttctgctcctactctctcttttgcttataaggacattgtgtgccagtacagtagttgaatagtgacccctttctctgagatatatgcaatctgtaacctctggaacttgtccctgtgacctaacttggtgaatggtctttgcaaatataagtaagttaaagatcttcaaatgagattatctagaatttagagagggctctacattctttgtaagtgaaaggcaggggaaggtttgaaacagagtggcagaaagaagacaaaaataatacaggggcagagagtgaaaggtgtaactgctcagagcaccagtacccaccagaagctggcaaagaccaggcaggtttcatcgatggagcctctggaggctcctgtagacagaccatgagttcagacgatgaccttcaaaacagtgagaagataaatttctgttgtcttaaatccaagctatgtgaattttctatgacagcctttggaatgccagtttcctgcttgggttggtaagagaagtcctcaaagttgaggcttctgacttaacactagatctcaggtctggggaagtagcttagttataaagttcttatattatgaacatgaagtagaacatgcctctgatcccagcaatggactagatgctctcaactgaggctagatgctctcaactgaggctagatgatctcaagcccatagcacggcctaggctaggctgagttatatgaaaaaggaaatttgaattaaaaacctaatcatagaaacagcagcagcagtgaagggggaagaggaagaaaatataactaactgcacaacatcaagcctgcaaaaatagcagcatgggtgagggagaggctcatgaagttctgcccctagatgagaagctgttagcaattcatggctgttggggaaagtagagtccattttctacagggatgtggtcccggagaggctacccatgctccagtagatggtgtatacagataatactatatggacccatgaaggtaaaatgtggggacagtgggggaagaattggaggggagctggtggggatggattttgatctgagcaccataaatgcatctataaagttctcaaagaaatatataggcctcttggctctgtctcactgcttccttacctaaaggccaggaatggagaagtagccatgttgatttagggccacctggcaggaggatgctggctgtgtcctcttggccataggtctttccttcctcaataatgctcacttccactgtccagccccagagcagatttgggatccaatagaaggatgaggaattgggaagtaacagtgacactatctcctgcctgagcttggccttagcccctaactgattttttctacatcaagtcactttctccagtaacatgactgacctccccgctgggccctacatattgctaattgcttttttttttttggttttggttttttgagacagggtttctctgtatagccctggctgtcctggaactcactttgtagaccaggctggcctcaaactcagaaatctgcctgcctctgcctcctgagtgctgggattaaaggtgtgtgccaccatgcccggctgctaattgctacccaacccttcagatctttcatgagccagaagacatcgagtcctaaaactgttcttccctgttcctcagactgggggttgcaatcagattccaccagtaagagctttggaaggcagaagacccagaatgtagctaagggtacctgtctgtgtcaggagtcagcagacatatatctttgcttcttgttttctgactttcctggcagtcacccaaacagaccaagttggttttcctgtgacacctgtacataggggtttcttttgtaaggttttcctgactgtcagtctaaaggtcagagtaattctatgaaaaacccagtgttggggatatctagagtggcttctctttttccaacaggatttcacagagatctgaaattactgaaaatgacttgatgtagaaaaatcagttaggggctaaggccaaagtcattgttacttcccaattccttattcttccattggatcccaaatctgctctgccacttctcagttctctcatgcatctgtcagctcccaatggaatggcactttttttttgtccatgtccttggccttcatttcctcatacactagtcaggcaaggttagtaaatgattttggaatggcttgtgtggtgttcccctataatgcagaagtagggtggaggtgggtgctcatcaggacaattttttggcaattagcactagggctagcagctttgggagtatcaaggagctgatggaggtgaaatagacagtaatccagactgaggaatatatcacaccgacacctccatcaatctttgagtagagtactgtgaaaatggcacaccttgattgaggctacagtctgcagctataagacagtccttagagaaaatgacagctgaagactgtgtgatgaaatgtcccagcagctgcagcaacaagacttcctctcaaggaagtcctttaaagtacattgtgaggctcacttttccatttagcttaagaaacactcatggatagagaatattgtatgttcctgcatcactcattctacatgatgcttgctcatgaacacttgatggtcacaaagatgagttgctgaatgaatgagtggtcaagggggatgaattcatatacagtatgagagggactgaagccctcatgagcagaatttctacacaagtgacaagtttggcaggcacccattgtctgtgatgaaaggactattttaatccttggtgcaggtaataaagtgaatgtcataaaatatcaggagtggataagaaattgggtccaccattttggtcataaacagtagaaacagagggcacggggctcagaaattctactctggatgctaggagcccatgatagagattagcctgaagagcctttgggaattctagtcatcttcatgtccccatgaaatctcccatgaatacagcaacaaatgaaaaaggccatagtgatagaatcaagtaagttacataacccatagatggaatctggaagaattgtcccccgttctatgactaattggagtagtcacttagtcactcgttctgtcaaacgaactgtacatggggcttcagttcttctctgccccttgagtagaggacagaagctcgtctaaaatgggacagacattcttttctaggaaacaatccctccagagaatctcaaacttttatacttttctcaaactctttcctgttgcttgaggcaaaaacctcacaattccaaggcacaaattagcagggtaattgtggcagtctgctgcttcttggaaggtgtagttttcacaagtagagtgctagaggtgggctggtaggaatgtttatgagtgtgggggttttatgtatgccatctgttcttggtgtcagaaccagagggtaggagtaagagaggatctaactatcccccttttgcaatctcatcatagttaataataataataataatggtgagttcttatgaagaactcagcatctgcccagaactgttctaagtcaggggtcagcaagctgtggttcatgctctgttttgccagctttaattttgcagagccttagagaagcacacctgtgaaggttagtctgcattgccactttccctgcattttaaatcacctgggagacacatctctggacaccagtaaaaggtgtagctaaggagagaagacctaccctaaaataagtggtaccatcccatggtctgtgatcctaggttgaataaaacagggaaagccaactgaatgccagcattaatctctttaatttcagatgatgagcacagttatgaccagacatcacatgctcatgcctgcattatgaactgtatcccatcaaactgtaagcagaagtaaaaacctttgtgcatcaagttgtcttttgtcgagtatttagttacagcaatgaggagtgtaacgaatacagcagctcatctatttatttatctgttgtctgtcatggctgtcagatttcactgctgctacagaggagctctgacaaggactttatgtcctgcaaaacctgaaatcctgacccttgaaccttttgtgtgaggtgtttgtcaactttttctatgagttgtttcatatattaattctataatccttatgatatggtcattgtattatcatgactttaaagactgggaacaaagagaaagatggaaatgtttgaggatgtggcagagaaaggactcgactgcctaaatctgactccagagcctgaatcttaaccactgtgctatgttcacagttacccatgaggtaagagaatctatggtgcaccatgaactagggtgtgagatgcatgtgtctatctgctttctaggagaacatccaaaaagaaaatctgggagacagattgtgagcttgctctccttatctcttacaagtacaagagtcactgatctttgttgtttaggaaaggtcgagggagctggggaaatggctcagtctctaaagtgcttcccacacaggcatgaaaactttcagttccctaaacacatgtgcaaaagctgagtgtggaggcacacacttataattgttgtgctggggagacagagataggcagcttcagcatccagctatcctagcctaattggcaaacctatgatcagttagcaacctgtcaaaaacttgatggatgacacctgtagaagaacaaaactggaggtaaacctgtggtctctacatctatgtgtgcacacacatacccctctgtctctgtctctgtctctgtctttctctttctgtctctctctaacccttctgtctccttgtctgtctctttctttctctctcccatctcaaagaatgtgctaagatttaaaaaatgtattcacagccatatgatttattttataaaagtgatgccaagtcacaaatgcacaggcacagataatgcaccattcacagatcctgcctggggaaataatgactgtgtggtacttcagagcactgaaagatgagctaaaaatcaagaactaaaaatgggcaaatcataggataaaaaggctggtgagtctccctgggggttgtctacagggaccccattcaacttactccaaagatcccgaggagaattgtcatctccgcaaagtgactctgattaagtgtcttggctgttttgttcatagctgtattaccagggcctacaaaactgcctggtatatctaaggagcatggtctacatttgccatagaaaataccttgtcaccagtgagctgacagcccaatggaagggagaagatgcctgcttccccccagtggcacatgggtataacttcagtgcaaaggagacctccataaactgttactcctcattaagcttcttcttctggacaagtttactaactgcaatcacaagcccaattaaatgccaggagtctggagaaagcacctacctgtgccagaaagcaagactagaaggatgcacctaaagagagtgtgtgattgccttctttttttttaaccccacctaactgatttttttcttgtattccttaggtataacttcataattaaaacaatttcccatgcctcctctgaatctaatgttaattcatctccacagaagccatgaggacttccagatacatttttggtggaatgagcacagtagttcattaagggttgaattttccttccccgagttccatatgttgaaatctgaactcccagtaggccatgtgagcttgttgggaaatagtgattgtatatgtaactcattaagattagactgtattgataaaggatagacactgactgacttttacatatagaaaggaaaggaaaatttgggcacacaggggaaaatgccaggtgcatctgaatgtatggaccaggtcatgtgtttataaagcaagaacaccaaagatctttgaaagtgttaggaatcagaaatggggctgtgttagaatagatcccctgccagagtcctggaaaagaaatagccccaaagatatgtagatctcaggcttccagccttcagactctgagacaatcagtttctgtttacttcccctcagaagctttattgtggattcatagaaaggaatccagaacccttcactcagttcagttcagtgtgatagttgcctcatcaatctcatttcttcatccttctctattctgtctttccatttaggatctggtactgccatggagcctggatggagccactggctcattcaaatatctttagtaatttgaagcatacagttcattggggctgcctagaatgcagcagacatcagcaagggtaagagtagctggaaacattagctgaagtgaagaccttgaagaacaatagagggtatagggatttaactgtaagcactccagttgacaaaagtagagtaatggtgatggcctcgaggaccaaggaactgtctgtatctgtgagttgtcccttctcccctctattcttctgatacatgacatagccatagtgccttctcattgagaagggcctgactagaccataggttagtgatttagtagtcctggaagagtcctttgaagagtggtttctgaacgaaaaaaaaaaaagatataaaaggaagagaaaggaacatgatggtcatgaatgttagcaccaaatgaaagaaagaaagaaaaaatgaaggaagaaagaaaggagggaggaaggaaagagaaagaaagaaagaaagaaagaaagaaagaaagaaaggaagaaagaaagagagacagaaagagagagagagagagaaagaaagagggagggagggaagaaagaaagaaaaaagaaagaatgaggaagaaagataggaagaaagaaagaaagaaaggaaggaaggagagaaagggaggaaagaaaagaagaaaggagagaaagggggaaagaaaagaagaaaggatagaaagggaggaaagaaaagaagaaagaaaggagagaaagggaggaaggaaagaaatgaagaaagaaatggagagagagaaagaaagaaaggaaggaaggaaggaagaaatagagaaaaagaagaaagagataagaaagaaaggaaaggaaactcttctcaaggataaaagaacctctggtggaatcaccatgcctgacctaaagctgtactacagagcaattgtgataaaaactgcatggtactggtatagtgacagacaagtagaccaatggaatagaattgaagacccagaaatgaacccacacacctacggtcacttgatcttcgacaagggagctaaaaccatccagtggaaaaaagacagcattttcaaatggtgcttgcacaactggcggttatcatgtagaagaatgcgaatctatccattcctatctccttgtactaaggtcaaatctaagaggatcaaggagctccacataaaaccagagacactgaaaattatagaggagaaagtggggaacagcctcgaagatatgggcacaggggaaaaattcctgaatagaacagcaatggcttatgctgtaagatggagaattgacaaatgggacctcataaaactgcaaagcttctgtaaggcaaaagactacatcaataagacaaaaaggccaccaacagattgggaaaggatctttacctatcctaaatcatataggggactaatatccaatatatataaagaacttaagaaggtggactccagaaaatcaaataaccccattaaaaaatggggatccgagctgaacaaagaattctcacctgaggaataccgaatggcagagaagcacctgaaaaaataatcaacatccttaatcatcagggaaatgcaaatcaaaacaaccctgagattccatctcacaccagtcagaattgctaagatcaaaaattcatgtgacagcagatgctggcgaggatgtggagaaagaggaacactcctcccattgttggtgggattgtaagcttgtacaaccactctggaaatcagtctggcggttcctcagaaaattggacatagtactaccggaggatccagcaatacctctcctgggcatatatccagaagaagccccaactggtaagaaggacacatgctccactatgttcatagcagccttatttataatagtcagaagctggaaagaacccagatgcccctcaacagaggaatgaatacaaaatgtggtacatttacacaatggagtactactcagctattaaaaagaatgaatttatgaaattcctaggcaaatggatggacctggagggcatcatcctgagtgaggtaacacaatcacaaaagaactcacacaatatgtacttactaatatgtggatattagcccataaacttagtatacctgagatataagatacaatttgcaaaacacatgaaactgaagaagaacgaagaccaaagtgtggacactttgccccttcttagaattgggaacaaaacacccatggatggagttacagagacaaagtttggagctgagagaaaaggatggaccatgtagagactgccatatccagggacccatcccataatcagcttccaaatgaggacactattgcatatactagcaagaatttgctgaaaggaccctgatatagctgtctcttgtgagactatgccggggcctagcaaacacagaagtggatgctcacagtcagctattggacggatctcaaggcccccaatggaggagccagagaaagtacccaaggagctaaagagatctgcaaccctataggtggaacaatgttatgaactaaccagtaccccggagctcttatctctagctgcattatatatcaaaagatggcctagtcggccatcactggaaagagaggcccattggacatgcaaactttatatgccccagtacaggggaacaccagggccaaaaagtgggaatgggtgggtaggagagtggggggagagggtatgggagacttttgggatagcattggaaatgtaattgaggaaaataccttataaaaattaaaaaaaaatttaaaaaaaggaaaggaaagacacgattgttcccaggtatggtggaggaggatgtttattatagataaagtagagcacatagataggagcatggtcagagacatctgaaagaatccagtttagacatgtccatactgagctgggccatgttgggagagggaggaggaacaaggagaggagacaggggtaaaccaggtgcatcagccagaaggcctgaaggtaaaaagagagtgcgtaaccaaaaggttatattatatgaggaaaggcagcctaaaaccctgggctggagagttcagggtaggggacaggatatgccagtcaggagctccctataatacctaggggctgagggatgcagggagaatctagagttcaagtctgctttgatgtattaaataagtaccttggttattagtcctagatttgaaacataagagttttgtcattcactatgctgggaagtggtggcacatgcctttaatcccagcacttgagaggcagaggcaggtaaatttctgagtttgaggccagcctgatctacagaatgagttccagggcaaccagttctatacagagaaaccctgtctcaaaaaaaaaaaaaaaaaaaaaaagaaagaaagaaagaaagaaagaaagaaagaaagaaagaaagaaaaaaaaagaaagaaagaaagaaaagaaaggaaagataacagtttctaaaaaattcatgttgttaagtataaagaacatagactctgaataccttatctcatgatgggaaagtagagaacaccagagaacatatctggctttagctactgtattcttctgggtcacccacaggctaaggatatggttctcaaaactgaatgtatgtcagtatttcctggagcaacttctgagcccatggttggacactcattcccattatagagttttggcttagtctagttagggcctgaaggtttgcatttataatgaattctagtgatgttattgtaggtgctcagggaccgtagtcggggacccatgggcaaataaacatgctctttaggggtcagttgggaaggatattcatggcttcatagtatctcctaggactcttgactgtataaacagtgagaaaagataagacttgcttactctgcataggatcaattagcttatgtttgacactcataggatagctcagagattcttatactgaccatgaaagtgtagtagttaatattgaatctttataatacattcagtttttataaaagaataagtaatataggtgttactattaccttcatcccctccattttacagataaataaactgagggaagaaattatggagcttgaggaaattgccaaaggagatctagctgggagatggtagggttgggattggatgtgacaatctaaatctagagtccatactcctttattttccattatttcaataactctgtagaagaaaagaggcaataaatagccctagtaatgttggccaagttatttgtattttctttgctctcattcctctctcaaaaaaggaaatagcttttcccatcttatgtgaaaaaaaatacctttagattgaaaaaaaataagctgtcaggattaattggataacagctgtcaaactcttgtagctccttagaggatggtgaaagaggaggaataattattgtgctattttctatgcagaccctagtacatttgggggagtcaatgaatgtctaatgatatttttggtaattagcaatgatggaagagagaatgttcaggccagagaagaatacttgcagggactaggtagtagagcttttacagttgatgtccagtggtctgagacctcatgctcctgtaagaagtaagtagggtatggctcagggaaaaagggagtcaatccaagctggtaagcctccagtggcccaggaggaaacagaggccaggattacttgttgattttcttaagttcacagactcctggcttgggcaattacagagcagttactgaagtggcttactaagtggggccaaagatcaactacattagcctcacttagaggcttattggaaatgcaaattcttacattcgacccaaactgattacaggtggaacctagcaaactttcatatttccaggtgctctggttacattctataattctggacttgttgttttagaggaaaatagctttgatcttagagtcagatactcagctaagatcaaatattgacactatctctttaggttatgtggctttgggcaacttaccacacctctatgactatgacgttttcaatctataagtcaagaatgtgaatgttataggttaccagtgggtacttcacaaggcagagactcttactttctggctttgcaacagaaaattttatcttcatggaatattgttttctttttacctgtcggacaccttcatcacctcagtctttcgcatatttatttactcaagatggagattgtttttcttctttttatgcctcctccatacacatggctctctcatcataagacctcccatattattgtgattgcttttaattttgttgtggttcccagaaggtgagacattttttcagtacagtctgttgttcctgtgtagtgtcagacagaaagtagctggaggaaaaatatttaaagtttgagaatgttaccaaaattcttgactccagtgagttttatgaggaaactggcagaggattggattaccatgtgggggtaggagtaaaagaatgtagatactagaagtcttctgcaagttatggatgagtaacataagatgggatagtgagctctgatgtttgaggactgagggacagatgctgtgtaattgggacatatataaacagcagaactctatgggctaaaggctcattaattggcgtacacattcacctttaacctttacaatgtggcctgctaactattgagccatcacttgtgttaagaagccctccctagggcttagattataggagaagatcttaaaacttgatcctccaaactagagatagctgttttccctgaagcttactgacaaccatcctgttctgtgtgacaaactcctggccagtgagaaagatcctgttttacaaaaagtagatggcacctgaggaattatgcttaaagaacataagcacacgcgcgcgcgcgcacacacacacacacacacacacacacacacacacacacacatacacacacaccacggaatactcttatctttcatttacttatcacagacaaggttgtagatctctttgggaaatagatggatgcttttcccatgggaaaaacaaacaaaaaccacaacagagagttccctccattgaccttaccaatcactggatacctggccaggttgctttcagtccagtttatgtagtgaatataaaaaacattcactgagaggaaaagtagatagtgacattatatgtctttcccagccctgttattttaaaacttggaaactaagacccaatttagtaaaaggtaaaagtaaggcttcattatttcaacaggctagtcatctctttgttttgttctcccccaccctctgtccatctgtccctccccattctctccccttcccctctttgctttctccctgcttttccatttgtgtcatttcccattgcaacaatatgaagtagtaattcagtgttttctacagagcatagcatagtagaacattctgagtttaattggagcataaatgtaactaatcaaaatattatcatgccaacggatgtgtgaagtgttgggagatttaaatatatatgtgtattttagttccacgtcattttggttttgagtggtagacacaaaggacttagcccagttaatgtcaaaaaacagtttagggtctgacagtgtctcagctaccctgtgttctccactcttcatatggtaacagcttgccagttcattatatttttgccctttcctcccactctttgcccctcttcctacctgtaccagctgtacagaataagaccatataactccagggagtttgggtccattccttggcataaactttaacatgcctatgagtgacatgaagataaaataataatggcagctgtttagatctaaatcccagtgctggtgttaactgtatggccttgagaaactttcactgttcttgtccatttccctttatgtaagaaacagtcatgatagtaagtactttgtaagattgattttagatgagcttatggatgtaagtaaattgggtagtagtatgtgtttgatatagttggtaaagagagaaaagaattcttgaagacacatgcatacatacacacatgcacatgcacatacacgtatacacacttgtgaaaaataccctttcgtcctcaccttcctcagaaggagtccaagacaacagtcaggttagccatgcttccaagtaagccatgtgtcctggctcagcagtgactaatgctttagtttctgagaaggtgtgtgtgtgtgtgtgtgtgtgtgtgtgtgtgtgtgtgtgtgtgttggggtgggctataagcttattaagaggctatatgtatatatatgctttgtatttagctctgtcttgaggacctgatctttctctccttctctcactactgggtctgtgtcctttatttcctgtgttttatttctcctgcctcagatctccttgtctatcttgccatccctcctttccctcttctctcttcttctccttgtctactttgccttttctcctttctttactttgttcccttcttccttatattgtctcagtgaaggtttcttagctttctggtgcttaggagaaagacccaagtgcctatgacccccaagcctggttctgcttgagtcagggtgcagagcatgcattgtagggaccccttcctgtcatatatcaaagccaatcacctcagtgtacttcatttttaaacattatccacacctacatggattatcagataacagttacttagaaaattgccttaacacatttgcatatgaaatgcatgaatcccaactttctggtctgaatggatgaatgcagaaatacttatgacttgttcccacaaacttactgacaaaatgttcacaatgtgcagttcatttgaaatttcaggatctgtttttcttgttttaaatacatatcatgcatcaattaagctgtaattaacaccctccctctattttctggtatattcaaaaagaagccactttctctcctgtttttgacacatggtaattagattgctttcacagataatatgggtaatactgaatgatatgattgttactgtggctattggtttactgttatatttttgatcagcttaatggtgatagttttcacgacaatgccctctacactaagtggttccattacacatgtatcttcacgtttcacggtgcattgtgcctttgatggtttgttacccactcacccccattgctttggaccagacagcttaatatcatcagtgtgaacttttaaatttagtttcatccaaaatagctacagtggactcgtgtactgctgtgtgtagggaccatggtgcccaagtaactgctttctgaccacttgtgacaatcacacagggtaagtgggatttgtggagtttagtggcttgggaagcattcatttgagaaaggacatgacctgagaaaaacccacgggcataggatgcttgggtgttatcctgtttttcttatattgctatgattaaaacactactgtcagaagcagcttcggagaggaatgggcttatttggttcacacctccagtcatagcccatcatcgtggaagtcagaacaggaagtcaagcaggaacttgaagcaaaaatcatggatgatgaacactgcttggtggcttgcttgcttggcagttgccatggagataaggaaaaagataggtgatctgagaagctaagaagcaggttctccaagacctggatgccttatcagctataaagagtaagggtagggcagtgtgtcttactctgttccttagttggttctttgttttctttttttaagggtgtgtatacatacaagtgtatttacgtgcacgtatgtttgagtgcatgtgtatgtgcctacatgcatgtatgtacccatgcatgcatgcatgggtagggcagtttttttattttgttcctaaataggttccttcttgttgttgttaaagtatttatttgtgtgtatgtgtatgcgtgcatgtatgcatgcatgtgtgcgcctctgtgtgtgtatgtgtgtgtgtatgtataggtatagatatgtgaaagccagaggttgtcttcacataacttctcctgttacgttgtacttactttttgaggcagggtctctcactgagcctggggactagctggctggcaaacctttggatcctcaggtttctcttttcccagcgctgggactacaggcatgcacataggtagcagggatccaaactccagtcttcatgcttgcacagcaagcactttattctccactgtagtggtaaatgtctgactccaataagaccatgcatggaaagcacaactcaattaatatgaatataagggagggacagtgaacttttatgtcaggttagttgagttctaattgatatgatggagccaatttgttgtggtaaatgtccaaccccaataagcctgtgaaaggaaaacacactatctatctatatattttttttgcatgcctagactggacagatgcaacactatgctattatactttccgtctatgaaattccttgttacttgcagttcctttaggccaagtgcttttgctccatcttccttccacctcctcctctttcctcctctctctcccttctctcctcctctctttcttctcctctacatccttctctaaaacttccagcttcaccttcccttccactgcccaatcacaggctttagccagtattttacctgttaaaaatagaagtttcagatgaagtcacctgagtatgtgattcactccccatcagaggcagctcctctgggggaagcagaattagcatcaaaatacaaatgggcaccagggcaatccacaacactccactacatccttagcctctaatgcttggctactttttcttcagtctgctaaactttccctgctatatggaaaaaaaatccggggcagtaggaaggctagaaaagaagctaatactgagaacacaagaagccacagtctctgtctgggcacattttaatcagcattttatgtaatccttgtgagtacaatggaaaaagagttttcatggtgattttgaagaagaggaaagcaaagctgggatagtttgagagacctgcttggcatagtccagggaaaagcagtgtagatgcgatttctgtccagcgtgctgatcttataaattcatttagtgtcgatcaagtggcttgttgaaggtcacatgacagtgaagcctgagactctgagttgctaacttcattcctgtttttttgctatgggtgactgctgtttttacttgaatcacacagttctaggcgtttgttcccagattgttctgaaagagggaaagatacctaatgttgcctccaggaagctaagcactcctaggaattttacaggtcatgtgtctctcgggtccacacccaacacagagggtgcacagcctgatctttggcacgcgctcagccaccatgagtcaagcccctaacttttgtctgtgcatcagtaaatattcttgaaaactgggccagcatgatgctgcctcattggaatgctaaatggtgtttagactagtgcctggtatgtagaatgttctctgtgtcactccatacgtcagaaccatctgctgctcacactacttgctgtaaaatccacattctgagtcaagtactatttatcatttaatatttgccaaactacatccatttcaacatcccattttatagatgaggacactgagggctggacactttctcaaaatcacttccctaagaaccaaaagacctggaagggaaaccagctgtagggtaaagatcctggaccctttccactctgctacagctgcttggctctcagcaactcttgggtctctgtctcagtcctctttcccttcataggtcctgtcgcatggagctggcgggctacccgtctgcagggagcactctgtgttcttgttctcagagctacaggccctcatctgccagtcgcccaagcacactcatgtaatcttaatgaacaatgtgcaaagccattaaaaactcaattaggactctctttttactgccgacgtgaggaaatgcaatcctgaggtgctcatgtgtaaacacaatagctgccatctgctactgagaagtgtgctgcctccaaaaaggggatctgtgtggcagacacatcagtaacagggcgcttatcgaggcgttattatgcacggagggggaaatgcagaatttatggccagccagagagtacttcctggttgaattccacgattttcagtgttatgtgtaataactatgaagaaactaacgctgttttatgttccttatcacattggtactttttttttttttgtttaagggcaaaggaaaaggctatatttatagtcttctttcttgttttatgcttgttttttttttttttttttttgactgatctaggcataatcactgactcatttttgatctctaggaaaccgacagccctgggatgatattaattataccaacctgttgatcaaagaaggccccactgagccactgcaaagcagggctctcatgcttgaataatcttagaaatggcaagcctgggatccaatggctctggggctacagctcttacttttatggagggtgtggtcagccatttcatggaggggctactggtatctaatctcataccatcttaagacaccacacccacatttctgattgttgtgaatttctgtccctttgcctttgcacactcccttctgatttgaactgcccagggttgcttctcttattggcatctcagtttaccacatcttacaactttgctttatgctttcaattctttgaataaagggacctgagacatagtaggtgtcttactgaggagcctggataataatgacatggctgtggaaatatctcaaaattcccttggctccataacccaattatagtctatttcttttaaagattccctttgtgtccaaaatgagtgctcctgagatttggagcacctgcaatttagccatggccatcctggattgttcactgtggccttactctctcctggattcttgaaatcctgaacactcagtgcagctgggagacgagaaggggtcagtcattcccatgtatgtatgtatgtgcattattacttgaggctcttgatagaaatgtaggtacagatgctataggaatgtggggggatgagattttcaggtcttctggctcttagatgatgctgaggtgtgaatgaaggatcattaactaggaagagaaggtaatgaaggatgtgggcatgagaaaaagccagttgttaaggactgtacatggaacaggtgcacagcatactccaatggctttgaaactcagtactgtagccactctgaacaatgtagggaaactgggcgttgcctctgtctctgtgtccagaattgtatatgaggcttcattgaataggataaatgcaacattcttggcaggattgctcagctactgaagctaggatgaacagaaatgatggcatgaaccagtggaaggaccacttcctaacattctctgctgtggggtataagaagctgcagatacatgcctaatggtatggcttggcaggtggctaaaaagctgagtatatatagaagccatcatgcaatctgggacagagagagtccagacatttcactactcaggctgtctctcttcctcaagataaactgctgctctcagtggcaaagactgagaaagaccactggcaaagaccactctttgtgagacttgtgagccataagccatctgacaaggagcctgcatgtagactctcaatggcaggcatgggtgttggttcagtcttatctctgagcctcaattccagctcttttttccttgctacctcattggcagcttataatagttaggtaacttctgtaatagggagacatctttccattcaccatcagttactcccaggtcatgaaggaggtttcttcccactcttgacgcctcttgatctacttccactggctggtgaatcaggagctggctgagttttctgaatagtaggtcactgataacctgacctcagtttcttctgtccttgtcatctggcttcctttttgaatcttattaatatgaattcatccaaatgcccccagtggtcatcccagaagaatagttctgtctctagttatctgagttgggttagagattgataacagggctttttatgtttggatgtagagcatgctggaagcccaagttggcatcaagactgttactttctataatccagctttgagggcaattgtataaagattttaaatataatctcccacctgtgtccacttgtaaattagttcagaacccaggagacaaagtgcaaatggcttgtactgtctaaaacccttataagaagtgaacaccccagcccttattaacttacagatcttagtccttttgctatcacagtgtgcaaggtgacttatggctactgaagtggctcattttgtctggggatagggattttatatttgattcagaatgaagattttagtgatcacaataaggtttcaaagcaatgctggtttttctagatggaaaacgcttatgaaagcattatttgagtttatctactgtgttttatgatacattttattcagtattattatacaacttttaagtccctgagtttagccttcccccttgattgtgaaattttgttaggtatcctagctggtgcaggctttgagaggctgcctacagtggtgaggactcactttgtctctgggcatttgatttcactttgcacaaatttcagttgttataaataaaagctgtcgcataaagagcggagatgtgtctcttcatagtgatggatctgaatcttgttcttggaaagctttatcaattagccagtgtcacagcaatgttgtatgaaccactcaggagcaaacccatggcaaacaacagtaaacattgattcttccatgcatggatccttacatcgatcacaggttgactgatacaggttagatgtgttgaccacatgacgatgcatcttgctttcaagggtcgaagcttggctcttttatctgtgtatgttaattcttgatcccaagccaacggagacaccagattctgtgtctcaaaaattaaaataccacaagataagcctagctctaatggcaactttcaacatctgtttgactcctattaacaagtcatataaaggagcccagatcaagagatagcctccggttctacagagggagctataaagtcagtgccaaagggtttggatccagaaaggggtaaagaataagagaggatttctatttgtcacaacagtggtaagaggctcactcctgcctgggacacagccttttgcctgcttagaagcagccatactttctgcaaatagatacctaatattaatatgagtctctgagagcgtagtgagtgccactcactttgcattcctccttacgcatctgatagtaggttctcatacttttttggcatttatttcctcctcggatatgctctattcacgtactgtctcctttaatatggaatcttccctgctgagcgcagaattctagatggagcttgtccatacacaggagcttcctatactatagggattctgcctaggctagcacaagtctaagcttttatgaggcaatcatttcacctgtagagactgcagttgactttcttgctaaggttttaaccctcaaggaccagcatttagttataagcaatctactgtgttggatgctccttgtatagtactagaaatgcttcttgtgtagtaactatctgtctcgttcttccaataccaccatgagtagggattttagcccctgaaatggaagtgctcagactcttagaggggattagaggggatatggcttcttcagagtcaacctgaccctgtcacctaaaaagatgttatttctaacatcccttcttggtaccatgtataggtatgacaaggtttcacaaggacatttttctctctttgtctctgttacccacgatgggtttctagggtccttcatgatggtgaacagctctggaagggcttcaggccagaaagcccatcttcttctgccaaccttgaaggagaatgacactcactgcattgacttccattactacttctccagtcgagatcgctccagcccgggagccttgaatgtctacgtgaaggtgaatggtggaccccaagggaaccctgtctggaacgtatctggcgtcgtcactgagggctgggtgaaggcagagcttgccatcagcaccttctggcctcatttctatcaggtatgccattacctttgcttgctttctagcaggtaataattacatccctttatttccctgcctttcccagagtggattggactaaaaagggcctcattcatttactctttcaacacatactgaagagtcttttccagggatgcagaggtgacctaggacagcccctgcctccctggaggtcatcaggaagagaccagtgtataaataaacagttccagcatagcaacttgcatgtggcttcctaagactggaggaatgcaggcaccagagcctcttacaaactaacaactgcattgcacacatgaaaagattgaggttcaaagcgagaagctgactagtcaggtagagtctatttggctagaaagacaatacaatagcttctaagaagagaggacaaccaggacctatttggaaggctcaattaaaatacactggaaaggttggaccaggcactggagatgctctgtggatgatgcagaaggaagcaagggtgagtgggagattctaaggaatttggaagctaagttccccttttctttttgtttgttttgtatcaagcttttgttactactattgtttgtttgtgtttgaggcagggtcagtatgctctagtccagagtatcctgaaacccacaatgcattccaggttggcctcaaagttatagcaatccttcagtctcagcctcccaagtgctagaacttcagatgtatgtaatcatacccagcagaaaccaagtcctttaaggatgtcttgctgaagagatattgagggaactgaacttgcagagcatgcaagtcatgggtttgaaggccaggctaacaatcagctcctataaccactgtggttcacaactaccactagggaagaagggaccatattctcctaattttttgtggaccaatatttctataagccaaaataaaccatgccattgcaatgccaaacggttgtgtttgctttgaaccccatactcacttgccatacttatcccagtgtggatgatgtgaaaggttgcagatccataccaatctacagaatgtttgtggggtacaaatccagacaggtttaagtcaaaattattgggaaattttctcttaaacacatccttaattaaattccccatgtcatggaatcaacctgtgtttaagtgtgccatccagtgcctttcttaaagtaaagccactgttttctgcattttaccaacatcaaccattgtatattttcatcatccaatgagctctcttgtacctaatctcagcccgcattcaccctgatgaaggttttcaagtaagaaagtaccacaaatctgcatctcaaggagtttttgttagtgtctgaagcagaagataaccccaggggtgacagatgagtggccagggcttcttagatggccctgagttccacacccagtggatagttctttcagtccatcaaggttaggaatgctttctctactgagcttgcttatttacatcaatgaggcagcttcagatctatttcttctttgcttcggagactaaaaatcagaatttaatactcaattaccttcagtacttagcctacatttttttgtcacacctatttcccattttatctccaatgagttgtgatttgtttttagaatgattgcactgtcctctgttaggcacttcctgtaattcctctagaattaaagggaagagaatgatgatgatcctgatgctgatgctaatggtgatgatgatggtgataatggtggtggtgatgatgatgacgatacctaccatttgttgagtgcttacgttacaggcacagtataaaatatcctgtcagaaattcagaggtgagtcaggcagagcctagccttgtggtagtgagtgtggactatactcattttattatcaggcagagccctattctctctgtgggagcagcaatgtcttaccaagaaaattggctaaaaagagactataatagttttaacatgtgtgtcattaacacagaggcatactttattgtagatgttttgagaaaggtgcctttggcctcattatttttttttaatcttttctccccttgtaaagatgtttttaaagttgtatcaggtccacaaacctcgatctggcattcacagtgtcagatatgtttcagagttcacagtatttgcaatttacaaggttataacatttgcatgcactgtgtgctttgtaagtaacacctatcatagaattgcagagccaagcttacagataggctaaccacaaaaattatatatatttacaagatatggtataaattaaggccgtgtatggtatctaaacagctcatttatcaccaatttatcttataaaatactcatatgacatagcttgctccagtgcatgccaggtgtctaggttgccttgggtggggggggggtgtccttctgttttgtaccttcatgggttcatggctgaggtaagatgttcttctttctacttcttgggaagaactcacactagttgttctttgagatgctctttagtgtaggtgaagtgttttaggctttgggaaagctttgtggtatattctatctagaaaatacagccagcctagtagggtacagcctagtagggtactagggagccagaatgaaatctatgcattggtatttaatctactgccttctgtagaaatttgaccttaatctgcttttagcatatccccatcttaacatagaggcagtattctaaagagtggtgtcccagttttctggttcatccgagatagccctgcttcactccgctcatcctggtgagttgttgagcatcatggggaccagttggactgctagattatacagcatctatgtccatagaggtttacagtgtgtatgttggtagaagtggttttggcttatctctattgtgtaccagacaaaaaatgttttactttggtaagcctcaatgtctttgttgtcattacctaactctgcaatagggccatgaaagcagacttcacaatataaaaatgaatagatgtaattctttcaatagaggtttatgtgtagcaatgactgatggcccaagttgatttccatgttctagtttgctgagctcttgtgcggatgaagctgagacacatattagagtcaaacagcacatagcaagttactgacacaacttaagttccctggtccccagggtatccctactttactgctgactatgaacatctgccatctccataagctcacaagtactctcaatgagacctcaggctccagccagaccctttctagagcctgttatgggtagacacaaaatagggtcagggcttgaagtatactaaacaggtaattgacacagaaaatggtctctcccaccatttgctctgctctttgatggagactgaggaagaaaaggacttttgatgagctcccagttctatggccctttggtaagcctcttcctgtatttcacatgtctgtactagagcttcctgtatttggtggcagcagatcccatcttccagcgtaggggacattattggtaaatcaacattcccatcaacctgcccgggttctccagctccgagctccatgtcctgtgttttgaggaagtgcttttcctattcttggaatctgctgctccctagttgtgtgatgacctgtgtcctgccatctattgtttaggattccagtggtctcggatgtaagatagaaagaggaacaggatgggtaccactctatgctaagctagattccacatgaggaggcttgtcgggcttgaattgattggaagaaagaaggagcagacatagaaggaaatggaagaagggatgaagccatctttaaagaaagacactgcatggttttgcctagcctctctagcctctgtgccttttctgaggtaaatagcctcaccgagagacttccaagcagtttcctgcatcctcgcattccctctgctctgagctttgtgatgataaacaacttgtctgttgaggcagcagtgtggaaaaagcacatgtcacttctatgcacacttagtcattcccaggcactcccacgtccatgggcacagtcaagcacacacatatgcccaaattcctgcctctgcccagattcaaatacactcactcataggtgacagaatgagaaaggggacctcccaagagacatagagacaggagcgaaacaggtttttttgcattctccatactttcaagctccagtcctgtgcatagagcctgtggactgagtcaaattcagtttccaacattgctgggttttgaacctcatgggtttgtgtattcatttattaaagccatatttcacagtcctaaaattgactttagctctgtaataaacaaaaatgtcatctttcatatgactgggctttggactgctgggccttcagcaagagccccaggtgagacaaatccctttgcagccctccccactcaccccacattgcctgcctctcttgggaaagctgatttactgcctgggaagccctacacttctgatctatgcctctttccaggtgatatcaattctatttcatattttaggagttcttaacttttctgccctaatattgagggggaaaataaaactgttactaatttttcagccacctacttactcttctctccattttctgcctatgtgaaatggccttttgttcagcacagagaagtgccccatagacccttcaaacgaaggactcacctgatgttggcataagtcttccccagagctcagtccctttctcaggatcttcctggcagttggtactctacatgtagtgttgacagtaacaattcaggagttgttgtcacagcagcatgccctctcttctacccttcgaatctcacccttctgtcccaaatgagatgtccatctctattatatagcaaatgttcttccttctacacaggcctctctgagcgggcatgggaaagaatgcaccttgattgggctctaagcaatcttccctatagtgtctgtagagcactcttcctaagagagactctgataagccaatgtttttctcttatcttttaagacatgtttgcagctctttcagattattgctgtggaccgagtcaaattcagtttccagcattgctgtgttttgcagaagggttgctaaagatcagagagaaaccccatgtctcttaagccatgacctgacttgtttacctccttcccccaaacatgtacagcatgattcatttcttttttagtttaatgtaattctctatgagtctttcctgggagtgacttcgaggttttgactgcacaggggcaagtttgaaccagtctgtataagttccgccctcctgacacttggaccaggaagtctccagcaggggtttagacccaaatgagctgtagttagctgacaataggctctatgcagcaaccttggggctgagcagtgtccttcagaggtgcttgagatacctgggtcagcattttcaactgtgatctttgcatctggggtccctgcttctaccagtgtcctttgcccttctgggcatgtggcccacttcaccaccccagtccacccactcccatcctgctccctggagacattcagctctagaatattctcttgcctttctctatctcttatcacattttcatgaccaaagatagctattatctctgtgttgacagctcatacacagactcttatttcttagaggacactagcatccacctttgtggtgtttgtacttaatgcatagccattatcagcatcttccataccaaggcagaatgatggggcagtcattgccacccagagtgacaggagcacaggagccttctgagtcaactgaacatcttccatgccatttaagaatttgacatttagctgggcattatggcgcatgcctttaatcccagcactcaggaggcagaggcaggtggatttctgagttcgaggccagcctggtctacagagtgagttccaggacagccagggctatatagaaaaacaaataaacaaacaaacaaaaaaagaatttgacacttagaaattaatatcattcctattttatcttctatgactttttctgttgaaatgatttgccaaactttttggagtctatttgtttcttttcttggctataattctttggaactcccaaacttaccccccccccaaggatatgcttttgggatatatatcaccacatatgtcatttggctttcaatatttttatactcttgttaacacaagaaacatattatgatatagttattaagatacattgtataggttttaaaaacttagaaaatttgattagaaaattgtatgagactaaacctacacaatcttgttcattaggagtcttattggtattacactataacatagcctatgatctctttatagatccatgagcatttgaacagaaaagtaacacatttagaatctatctatctatctatctatctatctatctatctatctatctatctatctatagtattgctttttccatttgattgatcagagaccaagacacatagtataaaatcttgagatactatcttcttttcccccatcatcgtttccctttcaagtctcttgactgagttttagagatcaagttagtctccttggtggtttattttttccattttggttaaaattctactttgaaacattcacattactttttgaaacaactgtgttctgctcacttacatttttcttattgtgtctttgttccacttgctatttgtaaggttactaagtcattctgccttaggtgtttatcttacagtacacaattagactttgattatttagacagtctggttggttggctctattttaacccatttatatttattgtcaaaacaaacatatttttgtatttgtcatttttttgttccacagtgtgaatacttttttttttgctatttcttttgaaatatatttgttgtacattctctattttcttttaattttcctacagacattactttggtttttccattaagttatttaaacacacacacacacacacaccatacacacacacacacacacacacacacacacacacacacacacacacctggttctttatggaaagacttctatgagttttccttgctgcagaatgaaggagatgccaatcctgattctgcatggtcttttgcttgttttagcttatgcacaattccactgaaggacaggactgcatcattttaggaaaacattttttggagcagaagcagctgtcttgttatgtgactgttaccccccttattatttctcaaaactcccagatttcacagataaactttaccaccaagaaaactgccccattcacagcaattgccatattcttaatttgctctcttggtataaattttagatctccagggccaacagagaatgctaagcattgggtccactggcctgaacaatatgatttcctatagatatttcctgtcactgatatcatcacccgttgtggtgtccaatcacaggcttgagttgagtagtagagacaggacaggggttcattatggacaacatcaaggtggtagatatggaaaaagttcacaggctgaatcaaaacactgacactgatacctgcctgcctttgatccacaaatggctgcttcctatgatctgtctaagaacaaatatggaaaagccaggctgtagctaagaaatttcagtatggtagaatgaaaataaggaatgaggttaaagtagaagcccatagatgtgcccagatgccgtataatagcactgcattactagagagatgtcccattgcaggtaaggtaaaagatttgaaatatgctcatagctgttacatacagattgcatgtgaggcaactttatgttatgtggatagaatttcagaactatgggctgatttcatgatggtgattagtgttctgactaatggcttaagacacagagctgggcttgacattaccaatgagttggcagtggtggaagggtgaatgtgtatagttagatgataagtagaggaagccaagaatccaaaggggtagagaagaagggatgcctataaatgcatgataggatgcatatatatatatatatatatatatgcgtgtgtgtgtatgtatatgtgtgtatagatatacatatatatgtatatatatgtatgtatatatatgtatatgtacacatacatatatcatcagatttagtaattagaatattagtgtctgtcatgaatacaatcttgagaggaatatttaataaaggttgggaattttatgcttattattttatggtggaagcaattgtgttagaaatggcttattaaactactaagaattatgattgaaatgcaactggccacagagaaaacttgctacaaagagatactttttcaagaataggaaaagctaaagctatgttaaggtcagagggaaaggagtggggcctggaaatacagaatagcaaaagaaagccaagaagagcctcggttctagaaactgcagcagggatcagtcatctgagagtgcatgcagaaattgtggttggtgtgaaggaaggttaggtgtggggataaggagtgggaagtcagcccctctctcatcttcttgaggctctagagccttctgggattgggtgagaggaagatgcaaggagcacactgagtagggtttggggatggagagggaaggtccacagagagcttgacaaggttcaaaaggaggtgtaaaggaattagtcgtgcagagagagtgacatgggtgattagacacctaggctttcggagagtgttgaaagatctagaatgtgcagactctgggaactgtgtgagtctaaggagcccatgggagaggagggttaggagaggattgtagggttagagtctgacagagaattactgtttgagaatgtagctattacagtttgggggaggatgaactagtatcgtgacaggtactgatgatgcttgcacacatgctcatctgttcccagtgaggggacagggaatgcaggggaagctgggttatacaacccatgtggaagtaaaaggtttcagtagaaatcagagagtagagaagagaaaaattcttacttccttccactcctggatacaaccaggtaggttgctgctagtttctcagaggcataacgaagaagtctaggaaaccttagtaagtggcccagcctgcaaggtgcttgctatgcaaacacaagggcttgagtttgatccctagcatcttgtaagaagaaggcaggtgtttagtgccagtgctgggaaggcatagacaggcaactgctggcctgacagtctagcgtagttggagaattccaagccaagtgagagacctatctctaaataaataaataaataaataaataaatccaaaatgggtggcacctgaggaatgacaacagaggttaacctctggtcaccaaacacacatatcaatatacacatttacacattcacacaaacacacatacacatacatacagaggaagaccaagttgattgcagaatagcatcaagatcaataaggacgttaggctattaataagtcgtagcttctgtgattcatttgaaaccacaatgaaggaccttgttctgattatttgttgctgtgactgagtgttattgctaaaaatccattaaaccattccaaatgactggctgctctttctttctttctttttttaaatgtattttattacattgtatttgtgtgtgtgtgtgtgtgtgtgtgtgtgtgtatgtgtgtgtgtgtgtgtgtgtgtgtgtgtctatgactggcttttcttgctggtcaccagagtgtggactttttgcctagtttggaaacccaagttacccggaagtacagtgtacactcctaacaggagacgttgttagttggttctgatgggaagctgacacaggaagtgactggggtctgggtggcttcttcaggtgaatgtagaggactgattctgtgaaactgacatcagccctgtatgttgcaggtgatatttgaatccgtctctttgaaaggtcatcctggttacatcgctgtggacgaagttcgggtccttgctcatccatgcagtaagtctattcgtttccctggatacattattatttctctatgccagactgggtagtcacaaggctgcaaaatcctattcattcagctcatagctatctctcactcactagctcttaatccttcaaaactgctcacaggatgcaaggcaatcagttctgaataaatccataatttggctggcctgttcaacagcagcatctccaggaatttgtgagactggcaaaacaatttgtctgaatctctctccattattaagggagtctaaagtcctgattgtttattagtgggattcagaccactgaagtagaaggattagagacctttggatagaatcttttgcaattgtctttttttttttttttaaagcaaaacaacagaaaaagaacaacattaaacatggagcaaattagcacactcttcacacacagggaaaagaaccccaaagctattaattctttttattttatcccacctccaccttccaactgttccacataccatatctcctcccccctgcctccgccccacttgacctctaaactccctggggcctccagtctcttgagggctaggtgcatcatctcttaataaacatagacctgaagtcctctactatatgtgtgttgggggactcatatcagctggtatatgctgcctgtttggtggtccagtgtttgcgagctctcaggaggtccagattaattgagactgctggtcctcctacagggtggcccttctcagcttctttcagccctccctaattcaacaacaggagtcagctgcttctgtccattggttgggtgcaaatatctgcacctaactatttcagctacttactgggtcttccggagtggggtcatgctaggtccctttttgtgagtgttccatagcctcagtaatagtgtcaggccttgggacctccccttgagctggatcccactttgggcctgctactggaccttcttgtcctcagtttcttctccatttacattcctgtaattctttcagacaggaacaattatggatcagagttctaactgtgggatggcaaccccatccctcacttgatgtcctgtcttcctgctggaggtaggctctataagtcccctctccctaatgtctagaattttatctaaggtccctccctttgagtcctgagagtctctcacctcccaggtctctagtgtattctggagggtcatctcaaaaacaaaggacaatatattaagtatcttacaacaaagccaaaagcagagagccacaagcacataaaaccacctacaaaaacaaacatatcaggaaccaacagtcattctctctttaatatctctcaatattaatggactcaactcacctataaaaagacataagctaacagactggctacacaaacaagatccaacattttgcttcatacaagaaacatacttcaataacaaagacagacactattaattcttttaaagtaattgcaaatatactcataaagtctatacaggtgtaaggcgagatttctcatggtatttagtgctcatgatagagtatcaagaattttcaaagaatgaatttatgaaattcctaggcaaatggttggacctggagggcatcatcctgagtgaggtaacccaatcacaaaagaactcaaatgaaatgtactcactgataagtggatattagcccagaaacttagtatagcgagatataaggtacaatatgcaaaacacatgaaaccgaagaagaacgaagaccaaagtgtggacactttgctccttcttagaattggaaacaatcacccatggaaggagttacagagacaaagtttggagctgagacaaaaggatggaccatgtagagactgccatatccagggatccatcccataattagcctccaaacgatgacaccattgcatacattagcaagcctttgttgcaaggaccgtgatatagctgtctcttgtgagactaggccggggcctagcaaacacagaagtggatgctcacagtcaactattggatggatcacagggcccccaatggaggagctagagaaagtatccaaggagctaaagagatctgcaactctatcggtggaacaacattatgaactaaccagtaccccggagctcttgactctagctgcatatgtatcaaaagatggcctagtcggccatcactgcaaagagaggcccattggtcaggcaaactttatatgccgcagtacaggggaacgccagggccaaaaaatgggaatgggtgggtaggggagtgggtgggggaggatgtgggggacttttgggatagcattggaaatgtaattgaggaaaatacgtaattaaaaaaaaaaaagaaaagaaaaagaaagaaaagaaaaaaaaagaaatttcattggctcaccacttcaagctccccttcgtgcagtaacacttgaatgtgtttcagcaaagagccactgttcctggccagcctgggtgcaggcagctgtgatggcatcatacctataagtatatggttggaagtctaaagtctcgggatgcctaggaatcaaggaagccactgccagagttggctgggatgccagtaatttgggagtgcttttgtcatagatttctaccagttgtttctacataacctctgagggtttcaccattctcccatgtggtcatgagagatcgagtaaatatagtttagtaggataaaatatccatggcagactgacatttaaaacttttaatttattctttgagaatctcatacatttaatataatatatctttattatatctcatttcccttccagttacccccagaatcccacactacttcttccttccttacctccccctcattcttcccttccgtgcttgcttcttaattaattattgaaaacccacagagtttaattagtactttccatatagtcacagttgttgggttcattcttggggcatagggagctgccagtggtcacacacctaaagaaaaaaaagacatagccctcccccaacacactacagctgttcactgccaatagctcctcagctaaggataggctctctagggagctctttctccattcttgctagaattttgaaatggctagattgtgtgcagttcatatgtagtgaaccacaagatgctatgaattcacatgtgcagcagctgtgtcatactcagagaccagcaattcacagacctcccctttgtatcttcttgcttgtctattctttcgatctcctgttatgtttcccaagacttccgggctgaagattgatttagagtgcccatctacagctgagtttgctctttgaaggctttgtagaattctgtaatgaactcatctagtcctggcctgattttcagttgggagactttagtgtttcagtcttgttgctcattatggaactgttcaggatttatttaaattttatattgatttacttttcgtatattgtaaccatctagaaaagagtccattccctttagatattttttttcagtttggtagagtaggggtgtttaaaaatatgttcttatgattttctgaatttcacttgtatctgttcttatgtctcccagttcatttctaattttactaaattgtgtcttttcttttgataaatttgactaagggcttgccaatctttccaaaacccatctcattgtgctattgattattttgtagtattttctactgcattaatttcagtcttggttttgattgtctcttttcatctactacttggatgactggtttgttcttgtttttccatggctcatcattaagttatttatttgaagcaggcacttattgttataaatagtcctcttagaacaagaagaccaaccttctaaggaaaagagatttaattagctcacagtgtttggaggtttgaagggcataacactggcataggctccggtcagtgatggctttccagaatctgggagcagaacagagcatcatatgggaataaagagggagtgtacatgtggatgctgtctctgtccatttttttttaaacactgggattgaactcttagtgttccactgtgacaacctcatcaaaatcttacaacatctaaaacagccagctctaaaggttatagtcagattctgacctctttctgccacggacttcaggaattcaactttggtatgagtttggaagattaaccatattcaaaccacaactatgctatggctgaggaagtctcctcatgaggcacatcctgtgtacttccctatgtatctttaacccacacccccatacccaggcatgagcctcccaccagccccatcatgttgcttcaattgaaatggatcttttcatttctgctaccattcatttgtcagaccttaaatcgctgttttcctctagcttcctgggataagagcaccatggtctgactcactagcttaaagcaccttctctggaaacatgtatgctaagttccaggttctgatcaatgcttgtggggtcactgactgggtctgacagctacataagagagacccactctcagagaaatcaacttagaaacgctgaggttagattccctatgactctccctattctctgggttatgtctcaagtctctcagagtgtcttagatggttctctccatttactcatgcctgggaaatgtctctgatgaagtagacttgttgtgaagaggatccaaagtccccagcattgcaggggttccacagtaggcatgcagacaggttttccttgcttgttctgattgtcttccttccctgactctcatgagttccacatgcctatagccgcccacagctacacaaactgggtccctgaaagggaagctggggctatatgggagaaattgcgagagaaataacgagccaagacaaagttttctgatcaaggtcaatgtttacttaagagtctgagcttataaaggggggggggcatctcatcctctaccatgccaggatctcaggatagtgtcaggagaacaggttcagcctctccgcacgtagtagtgtcctcttggaggaaaccccagatgtggcagaacaatagacctaatctaggtccgaagactccaccctagatgggctagctgacagtgacagaacaggtctaagccagctgggagaggctacagatgcccgttgggggatggtctgtattcaagacgggacagtggtatcaggaaatatctgctcttcttgcttccatttaactatacattcaaccctgtacattcttcagttttgagtagtcttcccgctaaaccttttatcttccgcacataatgcacatgcatctccccatagagcatgctcatctttgctgcctaaattcattatttttatgcttggagatggtctttctggtaggtggcactgttttccctccagcagaatacagtatggtactctgttcttgggtcccagtgctctgtgttcaggaaaccgcactttcactataataccctgttttggtgtcccctagtctcaactgtcttatctccaagtcctgcccaccaccatcaaatactcccttctctttgttgtatctctgtaggggaacatcccagggtgacatttggatggctttctacccacaaaattcctaaggatcattggacatcttcccagtgttcactgggacttctgtgaatttaagattctcctcatagcctcctcctcctcctgctgagaagtgtggattgcatggctatagaattgctaagagtcacttacccagcaaatgggccatgggatataactctagaagacatgaccttggctttatttctgcatggtgtattgtggctgtgttcaatcctagtgcttaggaggcctaagcacatccttgccagaacatacactctgaggcctatgaaagggtagctggaattggagaagaatcacattaaggatatgtgcaaacaccgccagtgtgtatagacctctgaggtatacccacagctcatatgctcagtgcattcattgctagcacaggattttatccatccttcatctcaacaagtaaattattgattgtgaactgtgtgttcaagagctctcctgggcatagctgatagttaagtaagaaagggttggcttttggcgcttgattggcaggggggcgagaaggaagaaagaaatgaaagtatctaatactagataagcagtggataatctggggtaatggaatgtgccgtgaatatgataaatatgggaggtggaattccttcagtagtgtgctcaaagatgtggtcagagctgggactctaatcatagaaaggaatttgctttctaagaatttgggtaggaacttctaggaggaggaggaaatggtaagtttccaaaggaagacattccagtgctgccagtgtgtcctggtagatggagcacagcagacaatatcctaggtgaaccttgggcaagtgacctgggacctctccacctagggctttaggcatcattatgagtggatgttagcaggggggcaatgtgaggaaggctttgggggaatggaatagttttagttaactcataaaggatgctgtgcagcatacgagtttgagtcccataggaaggatggagaaactataagaaagagcattctagagctatgcaaaaagcaggggtgacctggagcaggattgtgaagagtcggccactcaccactcagggagcatttactgagcttgtactcagtgtctgggattatggaactacataagacaaattcattgtccatcttcgcaagactccatcaaagtgaatgagatcaaaaagcaaacagccagctctgcatttatataatatgtaacagatggtttattgctttgcaagaactgccacaggacgtgccagagactaggtggcttaagtgatcactagatttttccaatagcccttgtggctaggaagtcaaggttaacgtgctaaaggtttggctttgtagatcatcttcctgggctggcaaatggtttcctcagtacaacctccccatgggcttttcctatatgcgtaagtccttggtgtccttttgtgtgtctacaattcttctttctgtaagaacactagttggattagatcagggtctacccaacagccttgtttgcgcttgatcagttcccacaaggctctattcctagattcggttacattccaggttccaggttctggaagatagcagcaccatggagaaacagacatgcaaaagggtgctgcattcaggtcctgaagataactagtcttatttgattggttgcattgggagacagatgactgcctctgtatctctgagaattcttgctacctttgaagtgctgaccacagaccttggggctgcttatgggtttatactttctgatttgtctgatactctcgtgttttccccaaaagctcagcctttgaattaatttctctcaaaagtttttaagatgttatctgtacagaaaaagatgcatttcattatgtcttcaaatgttctgagtctccacgtctgtccttcaaaatatttcctattgacatatggccagaatttatcaataaatgtttcaattaattattctaaaagttgtagacagagaaatcatcactgatttgcaatcttatcctctacacattgaagctggctttaaatgtttatctcaaacttccaaaacagttaccaaaatccagaccttatcctccaagtatattattttcttttataatggaaaacttctcatccatatcttatagctcatttaactttttttgttgtggttgttattattccaaaagtagtttggccatagccaccatccactgctgagtcttggtgtcagctgttaataggggcctctgaggttataactttggtaaatgtcagcacactttgccacacagtttcaaactttctaactcccaagttgacttttagagttttttccaacctctttttgcccccatcacagcctcgcagggtcctgtcgctcagcccacagaacaccagcaacattgtttctaatggatgtagcagttttcacttcaattgtgtggctccctgctgagcattgtcaggtttaaagagcgagataaagggcacaataatacgtcttcagatgctgcactgacatctgcaggagtttaaatgtcaccagcaccaaggcattttgccccaaatacacaaccagttttgtcttaaccctgttcagcaggttcccattttagaggaaatcagtctcaaggaggacggttttgggggcgggatggggtggggtgggggctgcttaaagctgggcgggtggctgcttggaggacccgaggtcacttgttattggctgaaggttgggtgagttgatattggtataataatttcattcacagaagtgcagaggcagataatgatggaaagggattggccaatgaacagactggagttggggatggaaggagggtcagaaaagcaggctccaggacaagaccaaacacaaggcggatcccaacagaaagacactcactggtcatgagacatgggtgatccaggcctcggagactagagtttagagtctatggagagagtgcagaaggagaggttagctgagaaaagttcctacaattgtgtggtttccacagtgtgtgcagagaggagagtcactgctggatttacaggcccagggaaggcacaataggccagtgggaactgtcccaggagactgaacataagagcaacttaccagaggccacaaactggtgggacctgactgttgatgggtttagctaagactgtggtgtgctcatcaaacttagtcaaggtttttgggtgggagacttcacgtaaaacacagacttctcttttttgtttctggagaaatcagatgactgacagctgtgagcaaggtactcccacccccaccctactccctgctggcctttagcagcagagcctccctttcaatatagtgtgaggtctctctagttcccctatttatccactgcaccttaatttgccaacattaaaatgggtgccaaatactggtcctcactttgaccacagcattctccttatttacagaaatatctttccaaaaatgggaaacaagagagagagagagagagagagagagagagagagagaaagcaagaaggtggtgactttgttagtgttgatttacagtggaatcgctttgttaattttgatagctgtctagtttctgtgagagttcgggcttgatgtgtctgctggaaatcagggctattagtgtttccccagcattttacaccggcaacattcaatatccacattctgaatatagaagggagggagggggtggagtaaaaaggaaagaatccagaatgaaactatggggctgaagtgggaggagaggagaagagtcagaaacaggcaggtgccaaccaatgaccaaagaaggactagttctgactgcacatgtcctaaaactaaaccacttgtcacatgcacataagtctaagaaaagaggggctttggtaaaatgcacaggacatcttaactttggagccaacatacaccccctccctatataggaagggtgcccctttcccttttataactgaagcaaaatcagacctataaggtttgctccgtctgtggctgaagaactggtagttctaaaaatagcttcacaaaattatacaggagcaccaaaggacagcaatttcaagcaacctgagcagcctgacatctatcacattggtagatgcaggaatcttgaacaaggagacggacagcagaagtggccccacctgggccttggacccttgacaccttagccgcagggtcctgacaacagcatctgaactgttgtcagctggtttaaaaacatgagcagatggtatatactttctcatggcaagtgtccttgatcacactgaagtccttgagttttggagtcttcctggtggtggcacattttggtagacaaaactgttcaaaacatccacaggggaaggtaacgtggactgcgttccttgtaaaatatctgagagcaaacagagaagccaggagactcaccaccatctaccctggaagttctttctctgcactgtgaggctgtctggtgataccaacttccctctcaaggtcaagaaggcaatagggtggctagtttgaaattgagtttggaactgggctgaattctgtttctgtctctgtagctttggtgcctggtatagtttcatttctgttgtgtgataaaatacccagattaaaaaacaacttaggagaaaagaatttatttggcttaaaattctaggttacaatctatcatagtcggggattcaaagcagatgggtgagaagcagatattcagtcaagcgcagaggaaaatgcacacgcacttccttgcttgcttatttctccactgcgcgatttctccatttaaaaatttaggatacccctgtcttggaaatggcaccctacccatactgggctatatcttcctacataaactagcttaattgagataatcccctacagaaagggaacacttacttactgctggtggaaatgcaaactggtacaaccactatgaaaatcagtgtggaagaaaatttatcctcagaagatggaaatagctgtaccacaggatccaactataccactcgtggtatatagcaaaggtctctctatcttattacaagatgcttgctcattcatgtttactgctgctctggtcaccacagctagtaaatggaaacagtgttagatgtccctcagctgatgaatggataacgaaaatatggcattacacaatggaatattgagctactaagaaagataaacttataaaattttaagctgttaaaaaatgaaattatgagagtctccggcaaatgggtaaagttagcaacaatgattctgtgtaagataaccccgggtcaagaaagacaaaggtcacatctactctctcatttgtgggtgacagctttgagtcagatgtgtgtgctttgtttggaatacccagagagactaagaaatcagtaaggggccacaagaggaagggagctttcaagtgaggagagacagaacactactataaaggattaaaaaggaagaacaggatgggaagggttaaatctgggtgggccgtgggaggacaatggagtggagagaatctgggaaggggaaattaaaagtaaaggcctttgaagaaagttatatggaaccctacagtccaggctcccgcaacacatacataagcataatatcaaagaattttaacagttaccctgcaagaggaggacagtaccccaattagagaccacatgttagcaaataaaatccccaagtaacagaaaggattacctctttttgaattgttagccaatggggtcccatagaacctcaagcattataagctattgtcaatagactttagaagttgatgataagaccatacttctgaaggctctagaatatgagaaattaagctggtactgacctggaagctttcacagtgctgagcagtgctaagcatgatacagaaggagaaaattaattaaaccagaaatgtggcaaaaaacagaaaaaaatatcagtttcacacagcgtttaatcctgaaataacaggaataaggacttgtggttacagattctaggggaagatgtgctagtaccattttgcttaacaaatgtataatattaaaatgattcctaatgacttattgctatagaccagtgcatccagaagaaagtgtcttcttgctgcagatagtaatgcacacaaagactcttggctgttctgtgtgcagaaaatatgagattctggtgtgttcatacatacatacatacatacatacatacatacatacataccatcacatccttccccacaaggctcagggatccagaagcagtggatgacataaaggaagcagtgttttctggacataacagggcagcttcagatatgacctcaaacggattgcaacagcacgcccaagacctgtgcaagctcaagccaaataaaatcccaggatggaagtaggagatggtatgaaattctaccactagcccagtagttcatgtgcttgatagataggggaagagggaaagttattttttcttcaatgatatgaccatggtaggtagaccatacgctatggcagactcttgttcagaaagtagttgggcaacataaacaggacttgaggcagatatgggtgaaaacaaatgtagggagggatggaagggatggtgaagaggttggatataggaggagctgatggtgaatatgatcaaattatattgtatgaaattctcatgagttaataaagatatttagaaaagggtaatcctcatagacatgggcactggtcaactgagtgtccacagtccctccatctttgagattatctttcctggtgattctagattacatcacgttgacaattaagatagctgtcacaacaatcttggatttgctgatgctaatttctgcccttttagcatatgcttctctgggataccatgaaattagaatagataaaacatgcaaagtgttttaagccagctgtttttatatcaacttgacacaagatatagttatttgggaagagggaatcgtttaagaaaaatgctcccaccagattggcccatgggacagtgtgggggcattttcttgattaattattgatgtgggatggtctagtccattgctggtggtggcactcctaagcaggtggtcctgaatggtttaggaaaacaggctgagcaagctgcaaggagcaagcaagtgagcatcactcctccatgaccactgccccaagtcctaccatcagactcctgccctgagttactaccttgactttcctgaatgatgacctacaagctgtatgatggagaaaaccctttcctccccaagttatttttagtgttttatcatgacaacagaaacctcaactaagactactgcttagcactggtggggttttcagtacatgttattcttcctatttttctccatgctctgggccttctaagacccctccattagccccacttgggataagtagtctgtgcccagcttatcactgattttattaatagtggtaggggaccttcattgcactcaatgacaaaactcactcctcctgtcattcattaattatcagctaatggagacctgatattgctgttttatgagtgacttatataaaggaacacttggccacacaaataatggaagagctgaactcagtcatccaacatgaaacccaggattaaccctgggtctgattacctcacatgctgattttcatttgaagacttttatccatgtgcccgagcctcagaatttgtgttccacttcctacccacacttaggatgtgccacagtgaaaagctgagaatgcaaactgtgcctatgtgagcatggccagctctctagaattctttgcttctatattcatgaatcatagggccagttgcatcatattcattaaattgtaagtgctagccatggtatctatcatatagaaatattcagtaaatgacacacactatagtttcttcctccttttctcctactatactctttgtctgtaaccattgacaaattcagcatcagcatcatctgcatcagcatcatctgcatcagcatcagaatcagagtcaagggaggaagtttgggttttatgattcttcttttcatctactgtcattcccaggggtaacattcattttagattcattctagtgatgtgtgggccaagttaaaagagagattacacagtagctagtcataggaacattgagggtctcaggacaggattcatgtcttgctattttatgatcccaaattttatggatgcctgattatgccaaactatacaatgctcagagtcttaggttcctgacctatgaacagggactattctcctgtgaacttcatagacgtcacaaggcttaaataggtcaatatgtgaagatcacagaatgggcctcatggtgtagtgacccatgtggtctcatctgaacctggcatcttctcagccacacattccaggatctccaggcctatccagggctgctgcccctgatggagaagtgggatgagcaactgcatcctgtcctcatgtgttctgtgtttggttttgtctcttaggaaaagcacctcatttcctgcgactccaaaacgttgaggtgaatgtggggcagaacgccacgtttcagtgcattgctggtggaaagtggtcccagcatgacaaactttggctccaggtaagaatgggagaggcccttgttcacaccatttcctccctttgcaaggaagaaattatgtgcgttgaagaagggtgtggtgggggaggggtgcggccatttttaaatatctctgctccttggacattgctctccaatcatgctgttgtggattcatatcgactgttcagctaagttggcattttatagatagcgaagataatggcaatctaaaagctctagttctagagtttgtgaatacaaactgcccaccaagcattctctaacgaaactttgtttttaaatctacaattactaaagctaagacaaatggagtatcttagggtttaggtttgtgacgccatcaatccatgactaaaaggtacttggatttctgggtgaaaccattactcttttcttggaaaatgtccttgaaatgagcagtctgttctctggctaaatgagtccatcattgaatagagtccaccaggacagtgttttaatcctgaatctacctgtgtttcttttctgctcattgattctacttgcttagcaagatgagagagcatttatctgggtggggtacagagccagagtttgggacacagaatgagagcatctgctgtgatgacattgtcaggctcttgtcaatgagaatgcatatatatatatatatatatatatatatatatatatatatatatatatatcacacacacaaatataaagttctgggacaacacagaaggtcgagctaaggttctttctccatgacatgttcataagatcaccttctctctctctctctctctctctctctctctctctctctctctctctctcacacacacacacacacacacacacacacacacacacacacacacacggtggggaatgcatggaatcaagcagtattaaggtctttcctcaataattctaatgtgaggtccatttatatcattgcttatatcaaatttttaatttaggtagcttgttcttaatctattctaatagtgaaatattataataaaccgcatatcgtgattttctcatctattaacctattgatggctcaccattgcattgtttcccatttctatctgctaataagaatctattgtaaacagtgtgcacatccatgtgtgtatacatgttctgtcatttcgcttgagcagacatctaatcttgaaactgccaggtcttgtgtagatgtgagtttgactttctgaagaacaaaaagctgtttttaaacctagttaaacccttttccattgccactgagcagtctatccaagttttcccacaccctcactgacactcattctgatcagtcttgtcaattagaacaggtgatcatttggtatttcaatgtggtttgaaagtttgtttccctgatcacaaaggttgtgaaacatgtttgtttctttgtttgatcgattaattttattttattttgttgctgttgtttggcccatgtagaatctatctccattctgatggcagttcatcctgtcatctctctcctaaatttgaaccttctttcttgctgttgcaaactccctggcaaagctcattcagacactaacagtttctccttggtacttatatccctcctcctgggtcattcaacactgagtagtgctattgattcttttcactgtaattaaagtacattttgctttgaagacacatgccatttcaatggcattgactccactggctcacaagaatgatataggacaatcacaatatttttcagctactttatttgggcattccaattattgtaaggtcagtattgctcccatactgactggtgtgcactaagccttacttttgtacacaggaggatgttaaaattgagcccaatggatgttttgaagaaaatagacagaaatacgcaccactgaggtctttatttaccgatctacttttcaatgtttttcaggtgacttagaaaggatacaaagcaagatgagatagtgtaaattaaaagggaggcaccccacgacaggaagctcacatgagagctgcttctcaggcgatgactacatttcttccttcccactgctggttttagggtcaccagtggggcgcctgagcaccacagccgccagtgggataaaggaagcttgtcagatatacagtttacaatgtctgcgagataaacacaacccaattgctcaggaaaattctaactgttgttcacacagaggccagacagggaatggttcccaggagccctcataaagcaaagactgtgtgatgtaatgagcagcatcctctaccacagtcttattgagggcacacaagtggcttttgtgggtctgcttcacatcataataatactctgtgtgaaagcaggctgaggtggtagaaggaaaggggggaaacacagctcaggcaggggtccccagctttctgctaatctatctctacccagggaggctttaaacttaatacagcaagtgaatagatacaataactattcctgcaaggaaatctccttgagtaccggctcactcctccatatttcagggaatattgcgaaggagggcacgaataccaggcattctgacagaggcctgtgtgactagtaaaattccacacataggtacaacactgtggttggaagttgttggctatatgatagtagtcacagggtaacagagttaacaggccacacacatgtctatataggcacatgtagtatatagacaagtccatcatttttgggatataattaggcacacaaaaatctaaaaccttcaatgtgtgtacttttccaaaattagtttcattgatagcagttttctaaggaaggagccagaaatggggacagggatttacctgcaactatatacaactggacagaggactagaaagacctagagggttctgcaagagggactaattaagtaaatactgggatgaagtaattaaatatgagatagtagacagagacttaatggcattttcatagtaaataattaagtgaaaagtgcaagctattaaacagttgatatatttaatattttaatgaaaaaaacacatatgcatatataaatgtgcaaagttatacatttacttgtataacatatatacagaccctatatgtcatgcatggatatatacatgcacgtgtgtgtgtgtgtatatatgtgtatatatatatatatatatatatatatatacatgtatatttacagtactataaagcatatatcaatattattaattgtgataatagattatgtgtgtttattctttttctatttcattgaaatattaaaaacgaatacaaagaactaacttaaacaaaagcaaatgccatttaaaaaggagaaaaatggccacttgtccctagatatagatattctagagttagcaggaagtctttcctagcatcgagtagccaactgtggtggaagagctagcttctgggtaaggactcaaagcagttgggcatactatccatccatgtgggtctttagaatattctgttatgtgtcctcctttcttatctctacctctctacccttaccccattctccagggactctagagcaaacctgtcagcccctccatgaagctgacctttgagatctctctacaaagagtttccactgagagactgtacaaccaacaatgcttgccaccttggaaatgaggcctgtgtccagatgctctgtgcagatctcagcagggtctgtgtatgggttgagacaatcacaggcaccagagagggtttgacagggcaaggttcttgttctgggagcccttccctccagatcagcggtaccgggttgtaagataaagaggcacatctgtctgtctacatagcagcaatgcttcctgttaccttgttacttgctcccatggggaagcactggctacccaaacaaagagtactgcatgaagcctctcctctcccagctgtttccaaactcaatgtccctctgcatagggcttctacacggtagtcagagaaactcaacaatgataataaagcctagagactacacataatggtgggcatgtcctgagggttaccacacaaaatatttttaatgctcattgccatccttcaaaaggctgacgataacagccccaaagaggttgtgcattggtggggttaaagagaacttcagagtcaaattgagattgagaaggagagccgggtgtgggctgtatcctaaagtcttgagttaattcaccaagtcactttgccataccaaatctaattattctttgcagctggatcccagtaagaaaaatgtaacttcaggctggggaaatggctcagtgggtaaggtgctcgccatgaaagcttgaggatcggaggtcaatcctcaggagccatgctcatttgtaatcttagggactgggaggcacagagaagaggatccatggatttgctggccagccatcgtagatgaatcagacagagtcagacgaatataggttcagggacggagggagagaggtagggaaggaggaagagagggaaaaagagagggagggagggaggaagtgagtgaatgaaagagagagacagtgacagagacagcaacagagacaaaaacacagagagaaagggagacaaagagactcagagaaacagaggagtggggagagacagagagagagggagagggaggaagagagagagagagagagagactgaccttgcctcaaaagtaaaatatggagcaatgtcagcctctgtcctctcaacatacacacacacacacacacacacacacacacacacacacacacacacacaccctacagccaactttctttatttagcatacattcatacctctaatttcatattcactgtactaaatacttaagtaaatttgaacttcctaaatctacaagaaaatcagtaaaataaaatatgcttggaatttcactcaaaactaacatctctggatgttaccttttatttctctttctggtctcatccttagccatgcttcataaatataaggctgatatttgcaaggtggtttttcttcagtcccatctcttcttacacgctctgcttgtaaatatcagcagtgtgttccttgttaaaaccaagggatgcttatcggtccttatacagatgttgttcctcggcttaaggatggagtcagagcctggtcagcccatcctgagtgcgaatggcatttagagtacatttagtacactcaagctaaagtccccagctcagcagtgcactgtattatggagttatggttgcttcctctctcattgctcactgactggaagctgggctcttggctgttgtccatcgtcttcacagtagggaagcacatactgctagcccaagaacaaatggcaattgaaaatttgaagtgcaattcctgcttaatatgtatcactttcacactgctgtgaagttggggatgttctaagtcaaaccaccaccatcagcagggttactgtacatgcctaactattcttttggcccttcatgacattaaacatttcttctctggagacctccctgccctctggggttcctgaaaccatgggacagtcagcataatgggattgttttagctgatttgcaggttgacaaggttgccggctctcatttcatagatgctggcagaagacactagtctcctggttcagagatgaggagccttgctacttttgacaccacagtcagggagtgcttcattcttatgttcctgtcccttgtccctcatagggatattgggggtgggagtgggtgtaggttaaagttccaacatgggagatctgtgtcatagttgaggaacattatgctaagaaaactataaattagaatttattaataagcagtattgagacataggctataaacctataaaccataaaacccagtactttctctttctctctctctctctctctctctctctctctctctctctctctctctctctctctctcttgtgccatgactctgatatttcctgctttatcttctctgctgctcctcacctgaaatttgctgaagatcaacaaatagctcaggctaaggatgaaactcctagtagagggtttccctaatgtgtgctgaggccctgggctcagggtcctgcactgtgaaagatgaacagaaaacaacgtcatctgcgcctcctgttctggctaccttcctcctgtcactgtgcagctcacctttggccctgacaaactctgacccagaatgtctcccttgtctccatctctctttcctgctgtttccctgtgtcttttctcagcccatcctctgtgtatgcttttaggattaagcccaactgacctggttttctgcttggccggggagccggggtagatcagagagcactcaggaccaatctttgccctacccctcttctccctgctcccctgagttcaccttccattggtgaagatggacattgagcaaggcagctaactatttcatcacaaggtgagaatggtggggctgggggcagcaagatcaggaaggccaggagggttgcacgttcaataggagcaggaacttcagaggaaggagcctcccagtggagtttggaagggtgaagcattcacaatcgaaggaggctgttactggaagatggaaactgtgaaacctcttcccaacctgcttgtcttatctactttgttgtaggcttgaagccccccatggggcttacaccagtcctcttctgagtctgcaggagctctggactcaggcatcagacccaaatgagccgctggccatgaatgcagcgggcctttggaagggcttcagtacagctaatcaaaaatgatttatgtctacttctatttcttttaacttttaataaagaataatcaaaagctattctttagagagtgccaaaaaggtacaaatgtgctcttaagagaattgatgggcatgattctagtaagtttccaaatgtcatactgttgcagggaggacggagggtgaaaagaatattcattatgagtggattgtaggaatgtcacctaaatatttgctggctgggagactcctggagcaatcagaccatttcagctgaaaatgttggacctgattatttatttatttacgtacattttttttatatttacttctgaagctcaaactagcttgcaagacacagtattagaatatttcctatgtagtgagcatccaatttgttgtggagaacaagcaacattttccctttattaaagacagtattgtcttcatttctgccaattacaaatcatttgcaagcctggctcctctctctgaaataatgacagctgacagcctttttttttttttttaaatttctttgagctatgtcttatctctttgtgaaaggaaaaatgtcatgacacaagaaatgagtagagagggaccagtaaaacagtgaggccaggatagataccttgatagtcatttaggaagtgggtgaatgaagtctgctttatgagttaggtaggcctcttctctgggtggtccctagacagagaggtcctacttgatggtgagtgtgtacttggcacaggataccaaagtgtaaatatatctaggctgtgttcttcaatggagctgacttacccacatgaaataagccagaggaagaggaatagaagctgcttttacagggcagaacaagagcaagagtaagatgatagatagacagacagagcaacagaaagatgatagataggtagatagatagatagatagatagatagatagatagatagacagacagacagacagacagacggatggatggtagatagatgatagattagataggtgaagatacatggcagatagatatatagattatacagatagaggatggatagatagattagataggtgaagatacatggcagatagatatatagattatatagatagaggatggatggatagatagattagataatagatacatgacaagtagatgatagacatatatgacagatagaaagatgatagatacatatagataggtgagagacagagagacatttatttctcaggcaactgttacccttagagagatgctgatgaacatgaggctaagcagaaggctgtttaggctgtaagatccctttgttctgttcaggacatgtgtcccaccgttggataatctagaatatatgcccctctctaacccgatgcagcaccctttacctcagtaatcagacagaatgtccagtaaccttctataatcagaacttagttatcctaaggtcaggaatgtggctgtgcatattatctcgggctgtgtttagccttctcctgaagatgggcgcctttgatgcaggaacaaaatgctcagccccaggaattggtcctagatagaaggcaggcagcgtttaatttgtgtgttctagggtgttatttgcccacttgctttcctttgaagggctaagaataagattatctttcgagatcttgagccccagaccaaggtccgtggcactggcatcatggcatcatttgggaagctatgggagatgagaattattcaagtccaccccaagcctctggaatcaccttgtgtatgatcctgatggacactggaaactgagaaatatggatctagactgatggatttgggttcaaaaaacattttttgcctgcagttttatcagctgctataccttgatactgtgatacctgtacacacacacacacacacacacacacacacacacacacacacacacaccatgatccttcttacatgtgtgtttctgacttagagacttcaactggttccagaaaactagacggctctgcttttcacagagcagtcatttcctgcaagatgaaatgaggtgcttttcaaacaaacaaaagtgcccggaatttgcaaggtctatttccattacagagccattgagtctgactctgcctgttacatactggacagcaaacgggtgctgatggtgaatggcctgttcctggaataggtcagcaaggaggtgcagctcctccctcaggaaattcacataaagctgtgctctgctggggctcacagcccagcttcactatacctgggaacttgctaaaaaaaaaaaaaaatgaaggatgccaggccttccaccaaaccggacaattctaatctgcaaactttaataaggtctctctactcaaagctatatttcttgacttcccattcatctttaaggtggtttcaaatatattagagacagagtctcactctatagcctaggctagcctcagacactctgctttcttgtgtctttcttccaagcgttggggacagaaatgctctccattccttcacttcattgggactattagttacttatgacccatggcatactttatcaagcatcagggttaatctgacttcccaattgatgaggtctaaggcaggaacagagagcccatgtttctagtttgcaggggatggtaatgtaaaccagtctgagcagcagccatgagaaacactgtcataggctattctaaaagcaggcctctttccacgcccaccctgtttttcctctgtgaagtaggctatttcggagctccccttcatgtttatgtttttgcctttttgttgttttgctagaatctttactcagcctgcatattcctctgggcagaaattataccttccacaccccacagtctctcgttttctgttttgtaaaataatgagtacatttccagagtgattaataatagaatagggaaagaagagaaaactccgagtccaagtaccaataaacagcatccgaaaatggatatcagctgcaggtctcctacaatcttacactgctaacaagttccccagagctactgaggtggccagtccagggaccaccctttgagaacttttccagggattttaaaaggatgaagtaatccccagctagtcggtgaacacagtgctgagtaaaaaccaagccctcaaagaggctagccagggccaggggtggtagcacaaccatattccagggattccaggctagcagcctcatgagctagaggccaggttgggctatgctatgttaagaggctagcctgggcaatagatgaaatggctttaaggtcttaaaaacacaatcatatatttgcttgacatcagtgctcccattaatcataaattgaacaaaaatatttatccaatttagttgtgcaatttgtgtgtgcgcgtgtattaggaaacagtatttcattgtagaatgtttgttttctgtgtgatcaattttcctccacagtcagtttccattaaaacaaacaaacaaacaaacaaacaaacaaacaacaacaaaacacaacccaaggaagcaaaatattcaggatctaaggacttgtagatttcaaagcaatgtttattggaatccaggggcatcgtgtataatttactgtaggagaaggaagaagtaggaaaatgcctggtgccatggatgcttttactgtctttattagagcatctttagaagacatatttctcatcctctgagcctgtgcatgcaagctacctctagctccccttcagccaaggctaagttccctcatcttgttaggacttaaaattggccacaagttcaagtgttggcccttgggcaacagttttaggcagggacttctcttttcagtagtgacatctttttatcttgagaacattttcccttggtgtataggatctataagtcaggcacacaaaacaaactggcaagaaattaaaaggaaatattttaaatgcttggcacatatatgattttatattgaagatgaaagcaaatctgagtactaatcaagtggatatgcttaccaattatttcataaagaattaaatcttggctgaatatgtgaccctccaaaatggagagcctcttcaatacttttcagagttgaccaatattttaattttataaatgacaatgataagaactatgcattatataaatatatagtacaaaatagcagaagtgttttggggccatttcagaaattgttggatttaatattaaaacaaacaaacaaacaactccttaagtcagctacttgaacaacagttgtatcagacatggcatggtgacatgcacagtgccaagtattcacgccattatcttgaatctcagtgtctgaggtgttagcccatgggcaatgtctgtatacagaattgtcttgattgcctaatgaaggcccagtctgaaagtgggaggcaccattccctgttttataccctggactgcagaagaataggaaatccagttaggtgatcaacaggtatgcattcttttcttcctgctcttgactgtgaatgtgactggctgctttaagcttctgcctgtgactccctgatatgatgaaattaatacagagccagatagaccccttctctcctcattatgtcaagatgtttcgtcacagcaaaggagatgagagtaagatgttccctgtgtcagtcaagcccgtggacatagatttctgatttttttttccttgtttaaccaaattcccttgtgttatctcctttgcattccctatttggcatttatctggggctgtgacagtagctgtgacatctgattcttacacagtcactatgtttgaatcccttctccacatggccatagctttgaagacatccagggcccttctcattggagtatctatgacctgagtttgtagtacttctgtgatctcttcctctggagtcctcgcttcctgcttgtctgttttgaccttcagccttaacctgcccttccctgccttgtctgagccagtcatactaccatgctctgcccatcaggactcgtccccgagtctaacctccatttctccttgctcacagtccatcactgtactatttctgcctggactctgggccctcctgcatgtccctgccctgctgttacctgctcccaatatgacaagtatgattatccaaaggcctgttttcctgagattttataagacaacctgcaatttccatccttcagtggggaaaggctctcggttcaggagctgaacagaaaaaaaaagtgcaaaaaaaaaagtgaatggttcaggggaaggcacttaatcctctcaggtctgccagaacctgacatcattaaggagataagtaaataatatgggaggcaacatcaagataaaatgtaaatgtgcacaatgcagcttttgcacttaaccagccctttcttttagtattagtttcctatcgtccctgaaataaattctgcaaacctaacagctcagaacaaatttatttcttctgccatcatagagatgaacagtcacaaaggaggttcagtgagttctgcatatagtgttgagatgttggtaggctgtcttccttgaggatgtgcccagcctgtgaccccctagattgtataaggccaatgatagctatgaatgaaatccatcacaaaaatgtaaatataaaaattgtgaggatttcataattgttttatatttgctttcatggtcctctttttaatctcaaaatctaatcatttttatttcaagggtacaaggattttgccttcatgtatgtttgtgtattataggcatgcagtgcctgaggtagccagagggggcagtgaatgacctatagctggacttatggatggttatgatctgctgtaggggtgctgggaattgaaggcaggtcctcaggcagagccggtgttcttacttgctgagccatctctccaaccttgattgcacagggttttgaacatgaactttgtagatgatgatgttttacaatgatgaaaggttggacatgcttgtaagggtcttgcagggactctgttccccttcccttattatgttacccaggacctctgctttagctcctgactccctccttctgaagaaagggagtggttgcctccctctgacctacccttccatctatacctcactcacctccccatgactccaccccaccccaatccaacatgagaaccctgtgattaattggtcccaggtagataaccccaaataacattccaacctcaacatccttcactatgtcatctttcaagcctcttttgccaggtaggaatatatattcacagcttctggatattaggtatgggtgtctttgggagatatgattccactgacagcaattttttttttttgctaatttcatggtcaatttgcaaaactcttgtaacaccagaatattcctttatgtgttaagtgtttcgtgtgccatctcatttattccttgcagtgaccccactggtggtggatttttgacaaatccattgtgtatggaaggaaagagaggtgcagaagaggaaaagagataaaagtgttataaataaatcaggttggacattatctatctaatctttcctcacagacttatctgcattactatggtattcttgcactgccttgctgagaaatggggaacatggacccgttgggtaactttgtatcttctgaagttcattcctcaccttttcaaatcagggttcaagtctcctatttgccagaatcttctctacatccttatcaccctgatgtgaaagtcctgtgtgtgtgtgtgtgtgtgtgtgtgtgtgtgtgtgtgtgtgtgtgtgtttggtagcttctcatacctgggcctaagctgtgtcatctcttgcaaggataccccaaggcatacacaggtagttgacagctacagtcctcggtgccttctgaaccttgcatggctttattctggtcacgctgggtcattttatggcgtgggaggaaggctatggccacctctcttgctgtcctgactttcaagagtgaccttactttagcatttgaggtgtggaggccatacatgtttgagacagatgtcttaaggacgttaaaatagcaaaatgaaggaaagggttcctttgacgctgcagattagttggaagcaggtccctccctctggtgggggcattggtgactctgctctgcagattagtttgaagcaggtccctccctctggtgggggcattggtgactctgctccctaaatcttgcttcactgtatccttgtgatatcgacaatcctcagttgcctcatgagtcaccatgcagctgatcaggtggctggccctgcctgtagccatgtccccttcctaacatgtccccagtgggagacaggttgtaaaaatgacactaaaaatgggatatggacatggagaaattatttacttcattgaagaagcaacagagatcacatgtggaaagacttgggctctgggaatcataaattgccaggtttctctaaattcaaccagacaattaaaatcctccatttcactttagagataaaaattacattaaagcaggcaatggagataaagtcttaggagaaagtgttcgtgttcgacttgatgctggaaagcccggatgagggacgtgtttgctctgcatatttatttaacctctatgacatttgattcttctgagaagagcagcaataatacacacctcaacaaggctgcgaagattaaaatggagaattatataaaagcaccctgctcagggtctaccacatactagatacttagtaaatatccactcaaaatgcatccacatgcatgccttaccagttattatagcttgctactgaaagaatctatttagccctgaccatcacacctaaaactcgggttgctgaagacaaacacctgtgtgtatttgtcacgatcttgaaaatcttggtaaagttgtcacaggaagtgaatggggtcttatctcttggggacccatagtctcaagtggggaacagtcatgggccaggatgtgtgggaagtttgcacaacacagagaagcatagctggctttgagatagtggtatgaatgatgaggaaacttctcagagatgagggtgagctgaacacagacttccggggcaggggggctgtacccagacacatagaacattcgaggcagaggagagagcatgaggtaaagaggggaggtaggcaatcccctatctatagtgacagcctggtacgggtaggctcaaagtctatgggtgggtaagatattgatcaccagcagaggagttcaaagccaggctggttgctagtgctctgcatgggctggggtttgctaatgtgttgcagtctgtcttgggggaaataccgtggactctgctcatgagatgagaggaaataggagggaggaaggttaaaggaatgcatctaagtccaaatgtgtgccaaataaggagctggggtgattagcaggagcttttgtcccagctccttccaatcaagcatccctcttctcaaatcagcttccctctcccatcctttatatgttttgagaagaggtcttattatgcaggctgctctccatcttgtaaggcccctgtctcagcttctagagtgctgggctgacagacatgtgctagtgcactcagtggcttagatttatttatttttagtcagaaccatagttcaggagatatagaaactgtttgtcaatctgtttcaagaaagtcttgggccccaggaacatgcgagggtcgtgaggtctgttgatggtttccagtaagcctgtgatgctaagatttcttctccccttcccttcctgtatcctcagcaatggaatggcagagacacagccctcatggtcacccgggtggtcaaccacagacgcttctcagccacagtgagtgtggcagacacctctcaacgcagtatctccaagtatcgctgcgtgatccgctcagatggtgggtctggtgtgtccaactatgcagagctgattgtgaaaggtgagtaccgctgtgctacaactttcccgagtggctggttataggaccttctctattattacaaagcaagccccttctcttacctgttgcttccgtcttcccccaacagctcaagacaggttcgccatcactgatctccctaacactatccgcgtgcgcgcgcgcgcgcacacacacacacacacaggggcaacctccaaatttgacttaaatttatttttcagatcaagataaacacatgtcctttgtgctttagtgatgttccactgaaatgtttgtgaggggttttaaccggaaatgccgtataatggctatatttcagaaagccttttgaaatgatgatcctaacctcccagatggtcttaagtcgatggttatcagttttcttgtgcttgtttgccttgaaaacttgacttcaagtttctggcaaacttggtgtttgagaaggtcaaagaacctttaggaggcagagccgtaagtcactggggtcaggctttgagaggccatagcctcagccttagccaactactagtttgctctctctgctttgtatttataattaaaggtgtggtttctcatctcctggctctgggtgccagctgccataccccgccccccaccattcgggacaccccttctatgacctcaagcccaatcaaacttttcctttcttaagttgcctctgatcacgtatttatcatatcaacagaaaagtaactgatacaaataccatccaatgcattttcctccatttaaaattacttttaattaattaattaattaattaattaattatacagtccaatagttacctcctggtccaccctcccaaacttcctcattttattcctcctccacactgtctccaagaggatgtccccaccccctcatccccactcttccccatccctgccaggcctccctactcactgaggcctcaagtttctcgaggtttaggctcatcttctcctactgaggccagaacaggcagacctctggtatatatgggttgggggccttggaccagctagtgtatgctgcctggttggtggctcagtgtccgagagatctcaggggtctaggttatttgagatttctagtcttcctatggagttgctctcctccccaacttcttccagcctttccctaccggggtagggaaccacaggggtcaaccacagggaccaacaacttcagtccattggtgggctgtaagtatctacatctgccttagtcagctgcttgttgggactcttggaggacagccatactaggctcctgtctgtaagcacaccataggcccaacttgggatccatctcaaagagaggctccaagatctgacactattactgatgctatgacatcttcctcttttcaaatgtctccatctccatagttgtttaggcatgtccaggtgtttctgttttggtatttcttcccttgagtgagcaacaattattgtttctgcacagtccctccaccccctatatatatatatatatatatatatatatatatatatatatattttgtattatacagaaccagattctttccttagatcaatttctcaggaagttgagttggtaggccaaagcatatgaacatctttatggatttttcttctctgtactgcagtacaaagaagggcttgatggtttatgtaggcagcaacagtgtatgaatgtattcattttatcgctgctatgttcactgattaaaatttcagtatagcaatatttagtgaatgaaataatgaacctgttcatattatgccagctgtagaataatacctgctgtgttggaagggagggaaaaaattgcttgattctcagaagacgacgagtttctgctgttgctgttgctttgtttttgtttgagcgtgggttggtggacaaactttgcatcctcttggctgggtccgtttgactggtggctgtaatgggatccgaatggagatccctgtctggacccctggaccctctcttctgacctgtcttgactctaggtgaatatccaagtggaagatgatatagtgtcactcacatcaccttacctcctttcctgcagcgatggtttcaattgattgtcagttcgacaggctctagaatcatctaggagacaagtctctggctgtgcctatcaggagttgcctttaggatgcacctgtgagacattttccatattgagtcaacatggagaagatatgttattcactgaggtcctggagtggataagaaggagaaagtgagtcccctcatctgtttccatctgcctcatgactgtggatgaaatgtaaccagctgcctcaagtcgctgctgccatgactacatatcaggatggacctcactctggatctaaacaaaggcctcctttacattgattttgacagggcatcttatcacagcacagaaagtagataattcacctacatagctcatatcccacttcacaagagccacttccctctgcgtattcttcatctgtctcccttttgggacctaagctctggtagagggagggtgatatctggactccatgagttgttcccactcaagggttatccctagcataggttctgtgctcactggacccgggaagttgctaatgtttgactaatttcatctgcatgggtccatcaattcatgagtctcaaccttcagatttctgtggcccgattgatatgtgagtgaattattgacttcagcaggcatttatttctttaccagaatgttatgaacctttaagccgaagatcaacaaataaggtggtcatgaacaaaataataccaaaaaaaaaaaaaaaaagcacctttaagttcatccatgggaagtgccattaatgtataaaagaagccaccactttgatagtgttaggcttagatctttgccccctccaagcccccagcttcatgagattgattcatgtgacacagtggcctttgcaggcctttcaaatagtccatgaatgtgtcatttcctgagcggtggccaggaacactctgctcactgtgctttttcgtggttgatttcccactctgctatgagagccttgcagaggaatgccgcattctcttacatttgctaccatcttccaggcaccttgcatatacctgcttggcgttaagtggaggtgaggggcgggacagactccaggagtcactgctgcacccccaactttttatactaacagaaaaatgcttgctctgttcttttcccgagtcttctagggggaagaggtggggttggggagtgataattcataggctgctggggcagggggattgcagaagcaagaccgcctaggcctggagaggtggcagtgggaacagtgctctgtcgtctgttggctatgccaactgaggcttagttaaggcaaggtggcaggtatcagctctggccccagatgtattggccgagtacgtcaatgtgacccagaagctattgctacttcctagctccatttccatgctctctcctttgagatatgctggggagaccctatggcatccccacagcagacaatggtgcactgggactttctgtaatctgaacccctttaatgacaccttgatgaaattcatccacatttttttggcacaggatttcacatttttttagtgcctctttcccgcacattttaatgttgagtgggtgataagccatttgcttggtcccatgaatccagaagagtcccttcacatatgctatctcattttatctaaatatcaggtgtgcatactaattttatttcaacttctttgttttctgggaaagccatcccagcaggggtgaggagctgagggtcaccctaaggggaaagctgaggttagagttgagtctgaggtgtgccgccttacttatattggaggacctaggaattggggcctcattggctcccggtatcacaatgttataatcagtgccacaggggtgcaggcaacaggggaggaggtgatgtctctgccttcacacaagaaatgagaggcagggtcactcaatggtacccgtaggaagccagtcagcctgcagtgcttgtccagtagctacttgaaggcagaggatgagacaatttgaggccagagtcttatgaagaaggccactccccactaaaatctttagccttggctgagtcagtggcctacatgctgttggagcagtagtccacattgtcatccctcctcttgagcggtgacagatttcgctcatcacacagacagcctgaggagtcaggcatgaacatccagctgtggctttctttcacatacacagtaatgcctgagtcaagatgcctcacttggaatccctggcctatctcgacccattgccgtaacttggaacatgatataagcctcttaaggccttagcagatacatctggaaacagcgttatagcattttctccctgggaggatgttgtgagggagcagtgagatgatcaatgcagaagtgcttagagctgtctgacacttgtgctctaagaaatgagcaaatgaatggcacatgaggtcggtgtccccaggtaaggacttgaaagactcagtgagtgggactgggcatctcacccagtacctccattgccttggagatatcatttaaggctgttgcttaatccccatgtcgtaatacttgagcataaggaaagagggaagatgtattaaaatgtagccagggagcatcagtgttagatgctcttaagtcagagttctctgggtcctctctaatgtctacctttggctgatgagtcacagaagctcaggagatggtccttctgtcacgaacatcacctggttacatggggtaccttttatgctttatgtcattcattcaaactctgcaagctagcataccctcatgttgcctggctcacccagcatccgagcagagtgaaaatcacagccttggaagacgcagactaatcttagcggtgggtagtatcagcgttcactaggcaactcagcccgaaatgaaagcaaattggaattacttaattctgaagagctgtttattgagttgtgataatgtactggctatatgttagattactctgtaattgaggtttcactcagttgacagcccatcctgtgcctacctgttccaggccactgctcataaatgttcgtattctcccctacctgtttctgagcttgcctgtgtcgtccatgccgtggtattttgcttggctaaaggacatggctgtcctaaaccagagttactcagctgcattctaatagtcacacattggtgatttttaaatgtggtgtccaagcccatttaatatccttccaagtgctcagaacatttcactatggagttagtgtctctaaaaaaatgagaggtatgtgtggatcatcaggtgagtccaactgggacataatggttgagtcacgattagggactgcagattagaacacacctaaacttcaattttggccttagtttctgctgcctgtggcaacttcagttagaactcacatttactcctggccccattttccttatctatactataggatctgatgggttccatcctagtctgtgtcctattgctgtgaagagacaccatggtcaaggcaactgttataaaagagaaagtttaattggggctggcttacagtttcagggatttagtctattatcatgacaaggaacatgctgtcttgtagtcagacttgttgttgaagaaataaccgagagttctacccctgggtctatagacagcaagaagagaaagaatatgggcttggcttgggcttttgaaaacctagatgtccacttctagtgacacacattctctaacaagaccacactgcttgatcctttcaaatagcactagtcccttgagaccacgcatcaaaatgtatgagtctgtgggtgccactctcattccaactaccacagctcccttggccagagaaacaatgtcacatgtatagactctagcactaggtaagtacccacaatattatgtctgttattatcaacaattttattttttgccattttttaagagacattgcccaaaggctctggctgttgtttcttgtcctggcttaagggatgctgttccagactgtggagatttcaacttaaattgcatttaggactcactcttctgaaagagagaggaccaaggtcatcagatccagcttgtgggtggatgtcagaggcagagctgctttacctacaatgttcagtattgacttgtttctgttgttttcttctttaaatattgcttttcatgcttaaaagcatcttcaagatgtgtaaagattctccacatctgaaactaatcatcttgcaccctgggctggcgacagagggctatatgttctaagcatgctttctctgcagctggccgccctcttatcttagtctattttgctcatttactactcttgagtctgtgtgttagtcactgttttattgctatgaagagacaccacgacgatggcaactcttaagcagggaagcatttaattggggccttcttatagtttcagggattagaccattatcatcatgttggggagcatggtagcctgcaggtggtcatgatgttggagaagtagctgagagttctccaaccagatctgcagggaacaagaagagagacattagacctgggtaggcttttgaaaccttaaaggccagccccagtgacacacttcctccaacaaggccacacctcctaatcctttcaaacagttccactctctggtgactaagcattcaaacacatgaccctatgtagagaccattctgattgaacccaatctgtatacacttgagttcacagctatacttggaaatctgggatgactgaagccgttgactccttatcatcttctttttagttactatttattgagtcaagaacgtgtcagatgctatgatacgtttgtggtgtgactagacgacacatgcaaacttacagtacaaatcatggagtcatcaggcacctgttacatgagcttaagcaccttcacaataaccctctgaagcaggctgtcaataaccccctctacaaatgaaaggagcaaagatgaatatttctcaagctcacataactttcaagtgacaaatgtaagcctgcctatctctcccttctgtttcacatttcctacaaaatccagaatggtagaagtgagcaatgcagtcctgaaaagagtgggagggaggctctgagtcgtcccataagtgatggatcctgtggccttggcaagtgtgtggacagagataggctgggtcagttttgaaacacgacaagcaagaatcaaatgaagagatatgcaatggtggcatgtttgggtgtggcaatgaaagttctttgcatctgcataagagctggagctttattctaaaagaatcatgggactccagggcacccacatgcgtggttcacagacagtataccaccatgaagccagatctctgcgtttactctgcattcatctgtggacctgcctgtacacagtggctagcctttccagtaaggtgttctcaggggcagtgcaggggggatgggatgtctagagtaggattaggagcttgtgggtgaattcaagacactattgatttagcatttgaacagagaaatgccacccaataaagggggcattggcccctttagaaccctgggtttcagttttcctggagagagagtgtgggttttaaaggtaggacctgataggatgctggagcattgctattcgtcccaagtcactagttgaggactccttctatggatgctgatgtcctggatacaggtcccctctgcattttggagaaagtctggtttaattgagaatgagatgtgagagtgaataagtcagccgaacacacggaaataaaaaggtctgagatatggggatgggacacagacattctccagggactccacagtgtgtgtggccttctgaaacatccaaagctgctggctgttgctcctcagttagagcaattacagagaacaaatgctcgctagaagaggtaatgccaaatgcttccatgggtgtgttcttggagccactgaagcactacaaaacctcccttttaactagacattttcccccctgtggcagtagtcagaggcaacaacaacgacaataaaattatatagggtgtagtgacccagaggccaggcttggggttcaagaatttgggctggggtctagcttcattcctatatcagtatagaaaccaccaccctccaccacctctgttcttccatgtactagagcagattggcaagcttctggcatagggcatgctgctgactatcctcagattcttggggcatccagcctctgttgtaactctttccctctactgccacagtaaaagcagctatagggaatatacagatgaaaatatacaggcccgtgagtcccaaaactttctgtctagagacaggaagagggctggatttgttatgccccattctgttcagctgcaagagtatcccagccttcttgcttgaatcttacctgactgaggtctccttttcctgtagcacccttagtgacaatttgaaagcatattttacatccttgtaaagccttcagagttgaggagatgactcactcattaaaatacttgtcatgcaagtggcagggaactaagttcaaatcccccacaacatatataaaggcccacaatgatgacacctgtctataatccctgaatttggaaggcaaagacaggaggctccctggagcatcttggccagatagcctacctgaattggtgatttacaggttgaatgagaagactttgtttcagaaaatgaggatgagtgtgatggaggaagataaaggtgctgatcagctgcacacactcacacataaatataatacacccttacacacacacacacacacacacacacacacatacaggtcagaactggcttgttatctttcagtgaagagatgaataggtgtattagagaaggggtagggagactaatgtgcaactggggttcagaagacaaagaggcagaagtctgacctaaaggccatggcaaacagtataaactgtgttctgcgtatgatataaactgctaagggtgatgtggtgtttggtatgcactgtgtgtgtatgtgtgtgtnnnnnnnnnnnnnnnnnnnnttgtctgcctttgtcaacacagacaatgagctatctgggtgggttcctgtcctgagattaccatttctcccataactgggcccaacctagctctgacccaggctgaccttgaactcaggaatctgcctgcttttataacttttttgtatttttcttacaagctggcttacagtgcagctgcctctgttcttttaggtctgtgaaactcctcatataattcctattacatccttatattttacatagttgaaaaactatatattcttgaactcatgttttcagaattctttcccacagccttaagagctgtcctgaagcagtatttaccattttgctaaggaatatagacacacccttgccttctggacgcttgctgtttttgattatcatggagtcattaaccttggaggggagaatatttctcacaggaaaaacataaagctacacacacacacacacacacacaagccttatgtgcatagcaatcatcaactccagtggaggcttatgccctgctgtctctgttccaggggcagtaaccatgttgcactatcctttccacatggccaaacaagactcagcacatattgctcacttaatggtcaggaagtaagagcagaagagactaagatcctgtagttccctgggtgggaaaccctagatgaccttatagcctgctttagttacttttgtatgacaatagtcaaaggttcaactgaagaactaaaggacatatttgtcttagctcatactttcagaaagcttaatctataatttcttgactctatgtccttgagcaaaataccatagtagtggcagagcatgtggctaagggaatccttcatgaaagacaagagtcaaagaaaagaagctaactagagaaagtaagtaaccagagaaagataaagattcccaaggtcatgtctaccttcacatacatcctccaatggcccaacctttttattttccaccacttcttaatgtatgataccattgaattatgaatcctactaatccatttaataggtcacagatctctgatctaattgtctttgaactagggttctgctgtagataaagtagtagagggctctacctatcttctaggcatttcagttttcaggtcaacttggacagtagtaaccgttacagacctcccagtaggcttcctcttttannnnnnnnnnnnnnnnnnnnnnnnnnnnnnnnnnnnnnnnnnnnnnnnnnnnnnnnnnnnnnnnnnnnnnnnnnnnnnnnnnnnnnnnnnnnnnnnnnnnnnnnnnnnnnnnnnnnnnnnnnnnnnnnnnnnnnnnnnnnnnnnnnnnnnnnnnnnnnnnnnnnnnnnnnnnnnnnnnnnnnnnnnnnnnnnnnnnnnnnnnnnnnnnnnnnnnnnnnnnnnnnnnnnnnnnnnnnnnnnnnnnnnnnnnnnnnnnnnnnnnnnnnnnnnnnnnnnnnnnnnnnnnnnnnnnnnnnnnnnnnnnnnnnnnnnnnnnnnnnnnnnnnnnnnnnnnnnnnnnnnnnnnnnnnnnnnnnnnnnnnnnnnnnnnnnnnnnnnnnnnnnnnnnnnnnnnnnnnnnnnnnnnnnnnnnnnnnnnnnnnnnnnnnnnnnnnnnnnnnnnnnnnnnnnnnnnnnnnnnnnnnnnnnnnnnnnnnnnnnnnnnnnnnnnnnnnnnnnnnnnnnnnnnnnnnnnnnnnnnnnnnnnnnnnnnnnnnnnnnnnnnnnnnnnnnnnnnnnnnnnnnnnnnnnnnnnnnnnnnnnnnnnnnnnnnnnnnnnnnnnnnnnnnnnnnnnnnnnnnnnnnnnnnnnnnnnnnnnnnnnnnnnnnnnnnnnnnnnnnnnnnnnnnnnnnnnnnnnnnnnnnnnnnnnnnnnnnnnnnnnnnnnnnnnnnnnnnnnnnnnnnnnnnnnnnnnnnnnnnnnnnnnnnnnnnnnnnnnnnnnnnnnnnnnnnnnnnnnnnnnnnnnnnnnnnnnnnnnnnnnnnnnnnnnnnnnnnnnnnnnnnnnnnnnnnnnnnnnnnnnnnnnnnnnnnnnnnnnnnnnnnnnnnnnnnnnnnnnnnnnnnnnnnnnnnnnnnnnnnnnnnnnnnnnnnnnnnnnnnnnnnnnnnnnnnnnnnnnnnnnnnnnnnnnnnnnnnnnnnnnnnnnnnnnnnnnnnnnnnnnnnnnnnnnnnnnnnnnnnnnnnnnnnnnnnnnnnnnnnnnnnnnnnnnnnnnnnnnnnnnnnnnnnnnnnnnnnnnnnnnnnnnnnnnnnnnnnnnnnnnnnnnnnnnnnnnnnnnnnnnnnnnnnnnnnnnnnnnnnnnnnnnnnnnnnnnnnnnnnnnnnnnnnnnnnnnnnnnnnnnnnnnnnnnnnnnnnnnnnnnnnnnnnnnnnnnnnnnnnnnnnnnnnnnnnnnnnnnnnnnnnnnnnnnnnnnnnnnnnnnnnnnnnnnnnnnnnnnnnnnnnnnnnnnnnnnnnnnnnnnnnnnnnnnnnnnnnnnnnnnnnnnnnnnnnnnnnnnnnnnnagagaccagcttattttaaagaagcgaaaatgtggataaataaaacctgacaagtattggttcccttgaattattttgactacttcatcagctgcatgctgatgtgttgaattaacagttttaacgcatttggaaattaaatcaaatggcagttgcattaaatcctcatccacttggaacattaccctcccgtgttcaaatggaagactgatgggggctagggaatgagctacagaggctgctctcggctggcacttgtggaccctcgattgtgcactagccactttgctggctatctgcacatgcgattttacttaaccttcactgtagtcttgaattgcacatgaagatgctgagttcctgctcgtcagtctcatgaatcacaaaatctaggtgtgcccacatagtggtatcatgacagattagatttccatacctgggaccggggagtcttagtgtctatgagtgcaattcatatatactatcaaatacctatctctcttacggtacatagcataactctgcagggacgaatggtgcagccccataggtctaagagacagtgggggaaacattggcccataccaactccatggggagatttctttatccctgatgttttggtgttgagtttcagttctgtggcctctggccagaagtggtatacagtgtggggaaaggacagtggagctggttacatataaggaagttattcatcttccttgagcccaagtctttctatttattctgatttgagaccttagctttcactttcccattttcctactaaatacccatgaagacatctgaaggaaaatgcggactaactctccaaggctgagatctatggaattttcctagtaagtctcaaactaatacaggtggctagataaccatcatttgactctgcagcacagctcctggaaacagtattccacctaagtctggaagagaacaaggagaccagcccctgtgaccaaggactacatttcccaggctgcttcactttcattagggccctgcatatcaaaggagcatcagtttaagagctgcatgtcctctcatgatcaatcagtttaaaagtaggatcactggtttccaccttcactcttgagaccttgtctgggtgatgataataagcccaagcttccaagagatgatggagtcaagtactcaagaagcctagttccttgaatcactttctgaagaagtgtctgctgagcagggctattatttaattattatttatttaattatttgtgtgtgtgtgtgtgtgtgtgtgtgtgtgtgtgtgttttcagctacaatgctttagggattatttgttacagtagctaacagtatcctaattaatacaagttggatcaagaaaagtcattaacgatgcccctaggcttaacctctttaaccaaatatttctagcctgttcagaaacagatggtaagatgcgtcttcccctagccacagacactggactcaagttcaagctagatacaactcaaaagatgaacaaatttttttttttttggcagggggatgtcgaatttttaattgctttattgcaactagtgtttattgatgcctccattccctcactgtaggctaattcacttctaaaacttgcagcatctcccctgaccactgcttcttaactgaggttactttcttctgcccacggtgtacacgtagtgatatcagaggcagatttggtttttatacgtgggaaatggggggctgaggggggggggctacaaattcaaggacatgaagacaaatactacatctttatatgagtgacaggggttagggatagcattggctatcatccatgaagctcaggaatcatggggcttaggtagagattgacctgatgggatatgttgttagctcagccagaagtcaagatactgcattaaaattccaagaactaatggtttatgcatggggcagggcctgatacattagttagaatgtccaattggtcatataagctgtccttgtgccggaactcaaccaatattctcattcttcagcccaggctgactagccaaccagtgactccatggagtatgcaatggtggggagaggaactagagtcaaatgctttacatttcttgctaccaacaacttagcaatgattcctatgatgtaactggcaacacgtggacatatcagcaacacaaaactgggagcagtcagtaggaggcagatgccacaaagcaagaatccagcaacttgggtgaccctgatggcttgcccatcaaaagaggttgcttgtactagtgtgacattattctgtctcctgcccaaggtatgctcattctcatccagggagcttcgaacctgtgcatagaggaggtttatctgagaagagatgcaactctcatcatgtggtcaagtaggcagggataacagtttctcaggtccatagttggggagctggattaaaatggtgagcttcacttattctttgtctttcttgaacaacagaatgtattcctaaaaccagtacaagaaacaaatggcacagctctgtggaattgcaggctcctggaatagtataaaatgcatgtttctttgccacctgggcaggtggatttctttgcttctttatttctttaacgccttcttctctctcttcccccattccccccccccccccccgttttatgctttcctaagcttggtaggaaagggagctaggatttggctccctctctttttacaatgaaatgtgcttgtgccaagcctttcattattaatcagagtggcatgcctgttgcttctatgtgtatccaggggcagatgtgactcactttccacccagtaactggattgtgtttctttctgatggtatgcagcctggtgtcagggagcaggcagttgctggcagagcagctgatcttctgctctcagcaagggagagcttcctcctcaagttaagcagcagcagcagaatgaagtctgcactttgctcctctgatcttgtacacacatgagcacgagatgccaggcctgggagacaggactgtagttttctatgtcttgaaagcatgagtacatgctcgttgtattgggaagatggaggctactcttttgtcaccagatgggctgttttggtccttgctcttactgtctggataatgtctgtgagtttcccagtttctccatctgtaaagagaaaatgatgttatctcaactttcctgaagtagtgtgggaatcactttttactagctaaggaaattcagagactcctctggcagcatcctctattcactgtgccattaatatgtttttttcctcttgcataggcaagtaggccttcaaagatccctgtctgtatttaggtaaggctacaacaatgtatggtcatgtgccatactttcctcttaaaccaaatatcagaaagatccttcattcatgacctctatttcatcacttcttctgttaggcaagccatatagacagaagttgggatgctgagttttgtctaagctgaccatcacagctctccatggtataactgcaatgaacttgacagtgaatgagcaacaattggaccaaacatggctcatctgattcccaagaatggtgcagatgggactaccgcagggatggctttgacccttgccccagccttgtgtatctcagtgtttgagtaaccgattctagtctcctttacagtagacagtgtctgtggcatctggtaagtgctactgtccctgcttaccatgctgtggaagcctaacagtgaatctgaattcagggaagggggacaggaaggtgctttgcttctgtcctcagctgttagtaacctctctcattcctgtgacagtgtacctgacaaatagcttcaggggagagaggtttgttttgccttgttcacagtccatcatgacagagaaaggtatggtggctcaagtggctcagtgcatggtgatgtgagttgcgtctccctcacatccatggcagcagatataaaacaaagagctcaggttggaagtgagactgccctgtaaacaagacccgtctcttctgtcccttgcactgcaccctggtagacaatttcttctagctaggcctcaccttctaaagatcgcacagtcatccaatacacctgtgccagatggggatcagctattcaaaagggagcttgtagaagccatttgacactcacgcccttacacttggcatagaggctggctgccagggtggctgttctttcttgctgggttcacccttggacacatttgcactcatctccaagactttcttctgtgagtctccctcttctggactgattacccacttttgtctaccaccagttttttttgtctttccttctgttcaacttacactgttcgttatgtgacccaccatacttacaggcctggagacaagggtggttctcccaggtaccttcccatcttattgctgagtcctggtctctgctgacattataccctaacttttgtaataagcagagatggcgtaaaatgcaggtccttccttttataccttgagctgcatccagcagttggctgtgccttgtgtctctataggctctgccttcatggtctcagcccaggatgctacttttccactctcttcattctgacatgactggacacttctgactgactctagttcctttgtttcactgatgattggccccactgtctctggaaaccatggagtctgccctgtggttacactaatgtctgcctttgtacgttgtggcccatgccaggagctcctttccaaggttaatctgcaaccagagagtccaccagaagttcttctggttgttaagggtggggattagctttcttttatattttagtatatttttgggaacttctattcctatggctgcatctttctttcatttctattcttggtgatctcaattagctctcttgccttatacttcctgtctatgctccaccatcacatttggaactcagctccatttccttctgtctttctttctccaacacacacacacacacacacacacacacttttgtattttactaaactttcaaagatttaaggcaatgagagaagtgtacagcagagaaatatcaagggcatgaatagttaacaaagagtccttgctttgacaggtgcctcagccactgtccactgtctgagtttgctttccattgctgtggtaaagcataattccccaaagcagcttggggaggaatgggttcatttgtcttacacttcccaatcacagtccgtcatggaaggaacttagctcggaaactcaaggcaggaacctggaggtaggaactggagcagaggtcatggaggatcatggaggcttggtcctcaaggcttgctcagcctgctttcttacattacccaggaccaccactggggtggcatcacccacaatgggtggggcactcccacatcattcactaattaagaaaatggaacacaggctttgcccatagtaccatctggtaggggcattttctcaattgaagttccctcttcccaagtgactctagtttgtatcaaggtggcatacagctatgtatcatgtgcaccccagcagcaagagctaggtggcccatacaggcctcctgctgtgctgctgtggcctcccccccccccccctttcctcagaggctcccaggcagagcagtctggcagcagagagttgccttgggccttgtttgcacagctcatttgtgccagcctcacttgccagttcctccctctggctttggattaattccctctggcagaggcacggctctcccctgcctttcctttgcatctcagaaacagaaccctatctcattgccaggatgagtccacccaagcctccatccctcgtacctcctggatttgcccaactctgcccacactctcattttcatcctgccaaagtaacagggctggggctagaatgcctgaacatggtggtaggatgggaaaccaccctgtccgcatcttgagtgtgagggacagcatcccaagtctagccggatggagacacagaggtcatggtgtagaccactaggctacctgggcaatggagtggcttctcagatagagttactttctagatggagttgcttccaaatttcatttcaaggctctagtgctagacctgagacttcctattctttcaccatttatggctctgttcctcattgatgctcccctcatatgtgctagggcaagtagagttgggacagttcagtgtctatactttctacttattgacctcaaagctaagaaagcttatgtctgttcatgtcagaatatcagtcttagcagaagttcttgtccattgtgcctgggatgagcatctcagattagcatagccattctgccctattggccagggttttgtagccaagtattgctaggagttgaaggattcaggttgtctaagaaggtaaaaatgggatacaggcgctctttctccacagtaaaacaggagggagcagctgtagaaggctgcagcggtattgtggaaggaagttcccctgggaaaagacaagcatgggaaaaaaaatgagaacagataaatagttgggaatttttgtgagttgtgtcccctgtactcagaatacttttggaaataatctgtgttacatctctgctgtaacaagtttcacaagcttggctcttgtggtaggccattttagaactgaatgtgtttattatttttaatttcacttatttattgattgattgatatgtgtgtgtgtgtgtgtgtgtgtgtgtgtgtgttttcacgagcccataagcttagtgaaaaatctccttttcttctcactgaattatcccactgcccacatgggatgtgtttagcactaagttttatgttcctgtcctcttgtaagagtcttagtcctggtctcttctggcttatgccagggcagagggaaataacttacagagataaagagcttttctctctccagagcatgtggcttgtagacaaggactgtttacatatagtctgtgacctaaaagcaagttatgggatgtcccctacttaaatcccagctctgccccctagtgtttgtgctggggcctctccccatcactctgcaacccccttgtcatgtctgcaaggtgcaatgagagtgtcatctttggttagtcataagaaatgtctgagatgacatggccacaatgatatctgtcagctcaccattgtctggcctcatcccacaggtggggcttattgaatctgagcacacctgcccgcaacttccatttgtgacctctaggacgcatgtacactcatgtactgggtttttctctgcccttctgtggctaggcatctctgagctgccaagcatggggctggcgttatgggcaagttttcttggcttgtgggccaattgatttcatttccatctctagcaccatagacttctctctgtgtgtttctgggtgcagatgtccctctgcttgcaatgaatgtagtcattgaattgggtcccttctgtctcctttgctgcatgccttccacagagacaacttccaaataaggccttgttcatagagaccctagggagtagaattcaaacatctcttcttgcgggggcacaattcaactcctggcacatatatgtcttattgatttaaaacccctctcccagatgcttgtgaattattcttgtgtgccttagcatctatagaatacagacaccttttcataatatgaaatgccagtgtatgccttcccaggtgtgtgcagaggccacagagcatcttggaggtgtgaacagtcagcagtgtaattgcctgtgcctggagactagttctttacttctttctcctctcactcttaggtcttgtcttccttcggctctattggattctgtctgtgccttgctgtcaggtagagctgaacccttcttcatagtgaccctcagggcagggagaccatccatagattgggccttgtgtctctccagctatagttctcaggaacctttcccaaaggctccctttcacagccaggctgactttagtcctcctccttgccactgctagatagtgacattgcttctcacagggcctagctttgggcgacttcttgactttttgaggatgcctggtccatccttgtcatccaagatgatctctgtcgtctgcacattgtgttgttatgcatcaagatccttaaattatgggttcaacaaagagaggtggttcggttggttctgtgttccctcattatccgtcccttgtgctggacacactgagaatactcagaggataaatgctgtatcaatgcaagatatggggactagagatattattgctcagtcactaaaatgcttcccacacaagcatgtggatctatgttcaagtcctattacccatgagtaagctgggcactgtagtgtgggcctatacacctagcactggagagtcagaggttagctagctagccaaatcagttatcttcagcatcagagagatgccctgcctcaaaaaataaattgaagggagattgaaggtgacacctggtgtcatccacatgagtgtggacaaacatgcacatctatctatagacatatgcacacagacattttcacacacacacacacatcgacaaaagtaaaggcaagatggttgtgtgtcgctgtctgtgttttggagaaggcaggcaaagcttgccatggtacttttctggcagacctgtacataacccaccccagctaaaagccagccacaggtattatagtcagcctaccaggctttgctctagaaagcccttccctggcacagtccaacacagacactctgcatccagagaggacttcctcctggcagccgtccccaccattacaagctatatgtgcacccagatctccagctatctgccagaaacctgtgctaagaccctggctgcgtccagtttgtctcttcttctgcaagatgtctatctctagggagaacactattggtggatgctctcttaaaatgaaatggttcttgcctggatgctctgaataactccaagttttgatacccacttccttgtagggaaaccatagagccatggttaagggcacacagttaaagctgtgggagttggcaaggtgagtggattcactatctagagggagtgcacaccacactcatagccacttggatggggctagcccccacaactgccgggggatgtctaagactggcctggcttccacccattcccttggagacagtagcaccaagagctgcaagctactacagacacctaatccaaggaaacttctgttctaattgctcttttcaagtggtatgcttgtagttccctggggaggggagggggagggacacatagtgtttgtagcaactgctaatgacagggctactgaaaaaagactgtctatttttagagtgaggcttcagcctaaaagaaataaaaataaacacgcagaagatttattttattttatttatttatttattttagaaaaagtatgttgaaataaatcaattccacctcaaaatttctctctcctggtgatgatggaatggggatttatctggggatgaaggtcaagatatatggggttaagtcatggcttggctgtagactgatagtgccaagagatggcacttcttctatggatcttgagggaagcttggatgggaccaggcatggcctaagtcttttccttcctataatctaataggcttcatgggctccagagtcagctttgtccagccaagatgcccgtgttttcctggggactgttcccaagattgtcccttaagtttatgcctcagcatttagctctttctgagttacagtaaacccttagcaaatactttgactaatgatgacaatcaacataatgtctgtggatgagacccaacagttactgagatactattgtctgtccagtctttgctgggtactcagggaacactcctgttttggctctgcagaagttttctcccttgatcccaccccaaaggtagagaccatatcttatttgattttgacaaaggccagatggcttgggccttagactcaaggcttctctgtggcagagggttcccagaaaaacttttagctgctgtcagatgtttctgctccctgcctcacctactgtgcatccttagaagaaacaagtgtcagctgatccttcagcccagttcctggaaggggcagatggaaaagcttttaaaccaatctggatccaaccttggctatgcctagctaagctgaaactgatccatagaactgaaagcaagaactgagggcccatgtccattatttagatttgtgattgcttctgtagcaaaggctgactaatagagtactttaaaagaaaggtattggacatggggagatgagtcagtggataaagctctcgtaagtatgaggtcctgagttcagatgtccagaatctacataaatctgtatgcaatatgcaatgatgggcagttccatagtcccagtactcctgtaaagagacaaggtgaaaggtgagaactggtacccaaggttgtcctctgactttcacaccatagcacatgcatacctggacacgcgcgcgcgcacgcggacacacacacacacattttttagattaaaagatttaggtaactttcataataactatgatattatttcttaatatcatattgtgaaatatatttcataatatattttatattatattactatgaaatattatttcataataaatattattaccacctaattatgcccatgaggttgtgttaaatcttcttatagatcttgccaagttctgaccttctcaacctggcaaatctacagccgtagtgttctgtggggttgtggtctataggctgtgtgagtacatctgggctgcaatattacaagtgatgctgttggagacgttctggagtcatgaagaggttccatttcctgtcttcctactggtgcagggaagagctaagtttagttttccagtcctgcactttacagagaagacctggcttttggaagtcccacctgcagaattgccaatgacagccttccacacgatttactgccccagaggcccatgaggaccacagtcccagagtcttgtagctcaactattgggatggcttctcaggaccttgggacctgctgaggctgtgtctgaagtcagatttctgggccctattggctgcattcatagtaactaaaagacagtctgacaccaaagggctcatttaaataatctcatcccagacttagcattctttttctactgattaaatatgttctatgagagcaacatagagtgtatcctgtctgctcctccctccctccctccctccctcttttatctccccatccttctgtaatctctccctcctttccataggtccatttcctatagtcatatactattttttgttgttgttgttgttgttttgttctgtgacccattagttatagccagatctatatttgtggccacaggtttaaaattagcctttggatcctgatgggcttatcatttggtacccagttgaaggcaataactatcccttccccagaacccataggttaccaatagttcagcaaggaaagttagggccccatgaacccttcctcaattcatgattggatgttgcttggcccagtcttctgaaggtccagttcaggcaaccggggctgctgtgagattgtttgcaatggctagaccatgccctgaagagtgttttgcagtccttccagctctatattctttcttcttactcctctgctctattttcttccttagaataggtggtacaactgtcctgcttggggctgaggattcagttatcatttgttctaagtatgttgttcagcagcaatgatctaactgttcatgctttgacccatagatgaaccctgctctcacccttaatcagagtagctcctccttgcagtaaaaacagacctagcgttcttatggacctgtgacctgatcatgtgcagatttggggtctggctaccacccaggactcctgaggtctcctctggacctaggagaagtatcagtccactgctacctcagagaccatgtcctgtccttgtcacctcacagcatgtggctgtggcctgaattcctattccaacttcaccccctgcagcctcgtttctccccagatctaggttctgctgtgctaactgctcagaaggctggcttctggtataactgcttgaattacatacaagcatggggacctaaactcaatcccccagtgtccctgtaaaaggatctggatggagacatttgaatccctggggcttgctaactagacagtctagcctaattaagaggcctctagacaatcagaaatctctgtttctaagtaaatagccaaacaccaaaacaacaacgaagccccacaaaagaacaaagtagatagtacttcctgagaaatgacacccaagattttactctggcctctgtgcatgcatgtacacacacacacacacacacacacacacacacacacacacacacacatgagagagagagagagagagagagagagagagagagagagagagagagagagagagagaacacagaggaccatgtggaagaatataatagtgttgcttgtgaagtgaagacctgtgtgttgataaacccagaaggttttccttagaagtcagcagcctccattggcagcaagggcagctgatggagccacagaaaaaaaaatatattgtattgatttcaaaaaagcaaccaaagtgagagttcaaaatgccttctggaaagcaggcagcccttggctctggtgaggtgctaatgagctccccagccaactccagccgacctgcatcttctcagagaaagacccagggcccagcatcaagagggcaccagcaagagggctatagaggccatgaatgcagagaggcatcctgggctcctaccacccccatgctctgaagtcttttgtttctttttcttttatcttcacaagaggaagcaaagtgtcagcatgcagtgggaattcctccctgtatcctgttctgatctgtttgcttgtataaatgagctcatctttcagaagagagtgggcctgctcctctgaaggagcagaaactggaggatttgcttattcctctcctgtggtccttgctacttccagcatcctgaggcgagatatcttttccatgtagatatcaagatacacaggtcaggacatggaacacaaatgccacctctggcagaagtgagcacgcccactctatgccggggcatgcacctgctttaaagcaacacttcatccccaactccagatacaagatttcattgtctgacttccacgtgacctgtgcatcttgatatcttgcctttcttggatttccatagtaagataggtacttggagctctgtgcaacctataacactcactcacctgtcgcacagatgtcagaggctcgagactgctggaaaggttgtggtgtctgtccctgttcattgtaatgtgagcatctacttttctttattcaccttgcatgttgaaattgatttattttttctaatttttgcaagatatatttcgccagcacatagttaaagtcttacacctgaggcagatatttctgccaagaccccctaaacatagtactttaaatcatcggaacctacttccaactctgaggcacaagaaacttaccagaccactaaacactgtggagctaagactaatcttttgtttgtttttttgtttgttttgtttgtttttttgttttttgtttttgagacggggtttctctgtatagtcctggctgtcctgtaactcactttgtagaccaggctggccttgaactcagaaatctgcctgcctctgcctcccaagtgctgggattaaaggtgtgtgccaccatgcctggctatgactcatctttagatgctctactttccctctacgctctgtgtcccttcaccttcctctcactgtcatactgcaaagctcagtttagcttcaacctgccctctgtagatttgttcaatcttcacaagcagatgagaacatcccctattctgagcttttccacaataccctatttaaattatatattcggtgttacttatgtattcaagtacttattgagtagctactatatgcccagctacccagagattcagagataagaggtgaggcaaccacatataccataccccgaaactatcagtagaacttttgccatgatgggaaatggtctaggtttatggtgtatgggagcagtcatgtatggataatgagtatttgaaatgtggttatgagtaaggaattttattttaaacttcatatgctttcaattaaaattgtttgtttaagcattcacgtctgttctttaggagtcaatagactgaaagtattaactgactgaccagaatagtgttacaaattgcggtgagggctttctgggaatcaaacagagtgagcaatgggaagaatgactttggacatgagagtcttcttagaggaagtatcaggagatcaaagatatcaggagatcaaagatgtcaggagctgtgggaggagcacaaagccaaccataaagggatgagtgagttggaattcccaggttggcatggccatggagagtaaaggaattgagggcaggcagcatgactagagaaggtgggtgtgtgacaggacggtaggctggagagagccatagaatcacatgactcttgtccttagaatagactgataaggacgtgctggaaattctcacaccaggcagagaatgagccagacatcaggcctgtacattggctggcagctctatgcttctacaacacatggtttccaagcttaatgggttcctggtgttcatacccaatgctgagtctggcgtcggcctcatttaaattccacgcccgtcccagtctcaggcctaactgacttaggctcctctaatttaccgagcttctgtacatgtcaggctagggggcctgtctgcatttgtctctgtgaaaaagaaatactaccatctctactggggctatctcttctggttgggcctccttggtagttaagattctagaagcatttagcacaaggaagaactgctgtaatgacaagtggatccttgtataaccttcacttaattgagtgaagggacagacactgcaaagacacaaataaaatttgggcaattagagtatgttgagccactggtaccagaccaatgtagaaatcatgcagctagtccatgcaacctcagaggagtctggttgtactcagggaggctgtgcttgcaggccacattgagatgtttgtatctttttttttcaactttcctgtcattcccatgagtgatactttctttttagaacatccttggtaggaagaggtggaaagtaccgagacagaggtcccctgggagctaaccctgggatctatgctctgctactttctagaagtacatgctgactaggtcaggttccttcttcgtgaccatgagggaaacagacatggatttgtgtgtttgatttcagacttgtctcattttatgcctctcttatctgtagaattgggataagcctacacacatatgagggcctttgatatgactcaatattgcatggcaggctccaaatctaatactcagcatttcttaagtgtcatagtcttcgctgttactgttgaaagcaatgctcgtgtcaacttggcataagagtggtcctggcaaaatgttggaattcagtcctaagtgtatggttcagtttttttgtttgtttgttttgtaggtatctatctatgttgtgcatttattatacatatttccacatgtgcaaatatatatatgtgtcaacattgggcatctgtttagttgctatccattttttttttgagacaggttttctcgttggacctagaatcaatggatttgaccagactagctagacagcatgtcccaggacctgctgaccttcactccactggagttacacgtgtcactgcccccaatttccttctttacatgggttctagggattcaagctcaggtcctcatgctttcatagcaactactttacctactgatgcgtgaagcctttagcactgatttttgatctgggaggaggcagccatatgaaacgtcattgtattaggcatgtttctgatgcctagataaaatgccatgaccaaaaccagttggtttttttgtttgtttgtttgtttgtttgtttgttttttggtttatgatttcaaatgggtaagaagagtccatcatagctggagacatgatagcctgagaagctgagagctcacacttggaaccacaaacacgaagtggaaagactgaaatggaagtggagtaagacctttaatctcaaagctcaccccagtgatgcacatccttcagcaaggtgacaccacctcaccttccacaaataatgccactaacacttgggtgccaagtgttcaaatatctagaactatataggacacttctcactcaatcatattatccaaatcatattatccaatcgtattatccaaaatatcatgagaggatctgtcatctggtctaagttcaaaccctgagctgtgaatgagcgagtcccttaagtagtctctcaccttttagccaaggcccaatcagcattcaatctactcatggtttattcccatttgcctacccaaatctctctcctcaccagcctcaaacccaagctatatgcgtgggagaaggggctgctagggttttgtctccacattctcttaactttggctcctgggaggtgtctttctgtctttgtatgcaaagagagctgacgtggagtcccacacattgcagtctgatctatccccattgttggacacacagcaggactccacaggcaaatggaaaagaaaaggcttgatcactgtttattttccttaattttcattgtgcctcttttatttttacccttgattataagcaacaaaaacgttcctttccatttgtctttctcacccccctccccttttgcagctgttggtttgaatagcatccactagactgaccccaccccccagactcagaatggaaaaaaattagctaagagggaaacaagaaatacatttttagttcagggcgggagcctcattttgccaatcctgcatccttctgtggaacaacccaccacttctagggacaaagagatttttgtcatcctgattgttttctttaattcctttttaaatttgaagacaaacttgattgctctatgatccagtcttagcttttatagaaaagccaaaggactggtcagttggttaagactttgcttattctcatattgtttatttactccctctggccttcatatttattcattcatcaaacaagcttgtatacctgctaattgcctgtgttttacagtggttacagatgcaatttgccagaatgaatgactgtctaagggcactcactgcctggctggggagacttctttgtgaaccaaagattgtaaggaaggataaatagcaaggcagtaagacaatggttgtggtcagtgcacagaaatgctgtcctatctcttcactcagcttctcattgactgtgtagcctttgttaagtgagcctttcctccatctgcttccccctctgttataatttagcagtggtgggcgtggcctcagaagagcctggggattatatgaggtatgtccaggtgcttaatggaacaccttgtgtagtaagtactatgagcgaatgtgcaaggctgtcacttttgttgttgagtaaggcaaacaaagatggtggcactccaaagatactggttgagtactagaccccatcattgatctatagccatctgcctaacttattattattatacagtgacaaccattgtgtcctctggtgagacagtgccaattcttactggtttgaaacctgcactccaacaggtttggctacttgtcagcaataagccaattagtactgaataacagagagaaaataaaaggagagagacagagggagatggagggaaggaggaggaagggatgaagagagagaaagagagagagagagagagagagggagagagagagagagagagagagattgattttcaatgtgattacattagaaagaaggctgtagagagccactgactcccccttctcgatcccgacatgagggtttagtttaaataaaatataatagacacacataactaagcagcccagaatgtccttcagtttatgatcttacctccaagaccaattcagaaattgtctctatccaggagacaagttcctcttctggccactcccagggcttcagactttttttttttttttccagcagggtatttctggggaaattctaactcctgtcagtcatcttataggcaaagagagaggaacgggtgtctctttggaatgtattcactcctgccaggcaggctggttatagtattcaaggtttagcagcattggcaatgcctggcacttgttagaaatagaaattctctgccgcacatattcttcttgattcagaatctgaggttagggtcctggaatctgctgtaaaaaccatccagattatttgagttcacactagagtttgagatgcacatggtaagaggtaaatgattacaggagtccagcatggaatctgcccaaatatcggtgcttgatagaggtatttatagctgttagccctgtgagagcaaaactaaccagcagcgaagaactctgccaggatgcagcagcttcttggaaagttcaatttgagccatctccaggaagatgattataggttttgaagaaagaagagaactgagtggcgataccatgtgagtggaagcatagtgatgtttggggattataaagtgtagtacttttcaagtatacaatttcaggagagaaagatgcttggagatatagcaatggacatgcatgactggggtcatgagatctgacttcacatcaaggatatgtgagctatgcaccagagacaaccaaaagctattaaacaaaacccacaaagatcaaatttggaataggttgaagtgtggtagtaaaaatattcagtgggcaagtagaaatgagactctaaaattgccagtctaaaactgttactgaaatcgagcagttactggtagaccagttgttcattttgaacacattctatcatctgcctttctataagcatatgctgatacctttagtgctctagatgttcagtattattcatatgaaatcagtgaagcaacacctttaccctcccatggtctctaatctcctgggaaatatgacaagtgtgacatgttatgtttaaaaaagggtgtaacccatgttaatctgttaatcacctgacatgctttaaatactatctctaatgtaatcactgcttttttttttttttttttaatctgctaacaaggtgcttagagtgtcccacccaagcatcaccttagctgtcaggaagtttcagagatgttctgtaatatcaggaatgtagcaaagaagatatgatgtagagtttagggattcttccctgatctgactggagcatgcagattacagaaaaaaatctggaagaacacattgaagagtgaagagatgggcccaaagccgccccaagttcaagacaaaaacagcctcccattgtgctgccaacaggaggaagaccgtcaaaggccattaaaaaggtggatgctgttatctcatggtattttcagcaaaatgtgaggcttctaggggagcagtaggtaccactctgagaaaggaattcacgcatttctcctttgcctaactttcttggaatctgtgtttgtcatggtctcagagggatgagtgtggattttctttacttctgtgtctctttagcctctaaacaccatatgtaacatatcatcagttgagccataacagccagcacatgtgtgccctgaggttggaagcaggaaaggctgaaggagatgtggatgaacaaggagacctactaggtagtaagaaggagacctactaggtggtaagatatccacattctggttcatatagtcccaccagcatagagaatagcagttactccagttttaaagcagggtacatgaagtttataaaggttcttaaccaggaatgatggtacattattgtaagatggatgcaggaatattagggttaaaggtgagatttggctatatggtgagtttagggccagcctagtctataagtgacactgtctcccaaaaattttaagataatgaaagtaaataaaaatttcaggttaagtgttatgctgttagatggctggtccattccctttctgccaaaggtatttgtcctcaaaatcctattctcttattgcagggagactcagcgtctttgatgggcaacattctagccagttctgagcttgaggccccagtgattggaagttaagtggctcccagagggggtcaggcctacatcctaaacaccagaaactgtaaatacattttcttagatgataaaggggacttggcagatgtgactaagtatttggagttgtgaggattatattgagttgtttggactcagtgtaatcatagggggttaataagtgagaacagagctcagagtccaagggggaatgtggtaagacagagatattggaaaggcaattttggcatcttaaagatggacaaaggggctaccagcaaaggaaaccagactgtttctcaaatttgaaaatgaaagaagtgaggaccagattaccatctagagtttccaatgagaacacaacctggccaataccttgaatataggatttatttcccctgctggaaatagcaggatgatgtgcttgctttctgctaagtccctaaatgttcagtaatttgttacaacccaagaggtcacaataaagagactacaatgtggactcataatgacctactttgcatacatggacaaggtcaggctttgttggatattgccaagctggtttatctgagactctcttttcttgtctgggaaatggaagtgcttggtttccattagctctgttttggctaccatgtccctaatctttagctccctcacagatgcatttgcctgagactctactccttccctagatgctgctggcactaaacatatttccgaggccactgactattcccttaacccatgtgtgcttctgtcaagaacttaatggaagggctatgttgacaaatgagagggaagacactggcatggcgggatatagcctggaggagcagtagagaaagctgctgttctctggagatcgagaaataggtgagtgaggaggggctccaagaccagcaagagcttgatgatccagtggggatggcataccaaaaaagtgccctagatcctccccaacaaattttctgccatagcctctcatgggctcatccctaccaggagacacaaaccaaaggaactcagagatgcaaagataggtttagaccatcaggtggctatagcaaaacagctggatgaggggtcaaacagatatgagcacaaaggtatagctgatgtgaatgcatgttcattgctatttaatattccctaacaagattaatgtcagtggtggcatacttaaataattagactttatgtgagtttctgaataaaataatattcttgctttgcctgttattgtctcccctgtggctgagaacacagtaggtggcccataaatattttgtttaatgaatcagtgaataccttgaaaatcacagaatacttacataatttcatttcctcatcctaggacctgcctcagaaatatcacataaccttcctaagacaaaacaatattatcagaaccagaactaaaattccagtacgctgggtctaagctcagtggtattttcagcccagctcagctgatcaagcctcccatggaggctcctcagtggcctcttgctgtgatgagttctgcctctaagacttagctgcccaagctagacaccttctgtaggaagacacaaccaatgtatctaaacagaggcaattggcatcttactggggaccacactgcacataaatgcatgcagcttggcttcagtaagtagaaaggggaggaagaattcccctaactacagagctaaagagggttatcactacagctcttgagcatctattgagtgaaggagcacttatttgtcagatactcaaaagagaacagagacaaaatctcaggagtatggtggggccttcattgctgcactctgtccatctgcccttgagcaaggtgtcatagggaggggtgtagccaactgtcccaagcctaggatatgtctgtgttctacagtggccatggtccccagagaaggttgccttagtggtagcactgcagcctctaggggataacagaccatggctgacctgctggtcacttcagagctggcagaatcaagtccaaagcccagttttctgtgttacgtttgctttcatgttagtaaaatgaagacatttgcaagaaaacatgaagactaaaaagtcaacatagtaatcagaggacagcatcaaggctgtctctaacaaggtgggggatgataacaaatacccaaatttccctctgacctccacacatgctgggcaggcacacatatgaacatatgtatgtgcatgcacatacacataatagaaagcagtatagcattgacatacactcattacatattaaacattgactttcccactctgtatgtgatcacttaattagggctcacagcaattctgtgatgtaagtatcattatgaccatgtgtcaaatgggaaaatggctaagcttttcagccaagtttgagatttttacttgctaaagtcactcatttagcaagtgtcagaggtgatactggaactcaggtcatctgagtctaattagcatgatttgcctggactagtgcttactccttggcaagcagttaaaatttaccatagttcagtggaacatctggcatatgatgacccatctctgagatatttgtcctattgatttttgctgtccaacatggcagccattggccacatgctgctctttaaactcaactctaagtagattaaatgtcattaaaaataaaataaagcagcactaaaaataaaataaagcagcacttgtgtgaggagacataacagcatagcaatttctggcttcacaacattctgttggatagtgctactagactagtggccatcccttgtttggtcagttagtagacaggctgaacttagatcccgcagaacttacagagggcattggaagaggattctagtcttaaccaggttacgagaaaacagaatggataaacattctctttgtggacaaagttcctggaaagatcacagactagaaaccagagactcatggaatccagatgcagcatcagatggcaagggaaggggctgtttccaggagtcaaagggactagtgtaaaaacccaagagatttatctgtgaactcagcaagagctgttctcgaagtctgctgtgggcgaatctgcttcaaagtgtgtgtgtgtgtggggggggagcagtaaagacaaagggtacccacatacttgtctgaggccagcactatttgtctcaccttagtattagtttgaaatgtcgaattattctttcctctgtctactaaagcagcactggaattttaccaaattcatcaagagatttacagaccctgcagcatctacgatactgcctcattgagtggttgaacttttcctggcagatgaggaagctcaagggaattacaagtctggagtgtaggtcactgttaagaaggtaaagaaaagggccttctgatatcacaggggtattggtagcctccaaagactgccccagtaggacatgaggacagatacaagattgtgaaccttgtgggaatttggaagtaatctctgaatggtccggcattggggcaggtacattaggcaagggttcatcaaatggagtttaatgactgtgtgaaatggatctacctgatagatggatgtgcagaagtgtctgtaaaaccaggagatagaggtaaagagtatgcctggatgtgtgtttgtttgagagagagggagaggaggagagaggagaggaggaggaaagagggagggaaatgagagtgaaaagaaaagaaaggagaggggggaagggaagacagagtggagagtggggaagaggggagagaaaagatgagaagggaaaagagagaggggaggggaagaaagggaagagagaggggagagaggaaagaggagagggataagaaggcaggagagagggaagagggagagaagagatgacagagacagggggagggggagggagaacttcatagggggtggggaaaaggggagagggggaagaacattcttgggtacacataactcaagtgtctttttccatgcaagtagttcatgataggaatgacataggaacatcagtgctgtgatgacagatccaagatcttacggagcatgcagattacatggaccaatcaccttgacaccccaacctgttctaactgaccctctttccccaggctactttcatggttgtgtctttcttgaattgctgtgtacctgcctgttcagatagaatcctacaggagagcatggctgctcctcccagtcctccacccttgccagtcactgatctggaaatttcccaagtgttccctgcctgcctctcagagcttgcactgacctgcatcaccgaggcccacagtgacatctatatcctccctactaaagcggatcaccctccacttgcttctgtcctagacagcctctgtcctagttccctaaacacgctgttcccgagaatcacctgttcttcacattgcctccctgatttctttaagatcactttcccactctccgttctagcttcaaccttcattacacatttctaagaaccactttgcaatttgtctctctgtccaggtcagagcaacatttcttcttgacatcattttacacttgcagatgctacatctttctgttgttcaaacagtgctctctctctctttggaggagtgccacttgcatagaagcaatcaatagttcagtcccacgttcctctcatttgatgcttgtcaacatttgtcagttgtgtattttcttaggtatcttctcacatagacaagctgtgagctcagagcatcaagtatagcatggtaggtgaacagtgtaagtctgaggtctctacctacctaagttcatcggtaacctaaggtcagctacagtaagtggtgatcctaaacctattaggcaaagtcagcaatgatcaaagtgtcctctgcatcagcatcactcaagaacataattgggaactccaaggcctgagaccaaccttagacgtacagaatcagaaactctggtatggctttgcagcctatagtgagaccagctctttaagtgatccctctgcacattatagttagagacatgcttactagaggcaactgccatagcataaaaatatcaacaaatatcttgcgattcaaatggaagaaagtttaccacttaatggaaactctcctctctatggtgacttggggcccaggctcttcttatcttttgtcctccaccaccttctctgctgcatcaaatatctagtgagcagtttatttctgttgtttgttttgataggcaaagcctgaaagactgtgtgtgtgcacttacttttcagtgtctggaactcaactgcaatggccatacccatttgcatgggaaccaaagaactcatgggtttacgaacaatgttatttcccagagagatggtatttatcacccatcgaacatggactgagatctcttaacagcagaccttatctgtgctatggtgacagaggagggtcttagtcacccaattaaaataatttagacaggggggttgagagataccagcacaatgcacaagagggatccagagaggtgattagaggctcctccctcagtgatgtatttgtgaggtaatggaggatgaatggagacagtctgttctttgtggttggcacttctgtgccaaacatgaacttatggtattttgaacactatataagagagaataaaggatgaagaaaacaaagcttagaaaggttaagtggcttgttctgaccatacagctagtttgctctgtgtgtgtgtgaatgtgtgtatgaatgagtaagagagtatgtatgtatgtgtgtgagggtgtgagtgtgagtgtgtgtgtgtgtgtgaatgtgtatgtatgaatgagtgagagagtatgtatgtatgtgtgtgaaagtgtgagtgtatgtgtatgtgcttagaaccccaaggatttgtattttaatcaacaacaacctagtatgctattagtgtaaattctagcagcgtcccctctgatcagcatgaggaatatggagctcagaactggaaggaagtctggaagtagctttatccatgtttccgttagaagctttgggtattctaccttagaatttgacttcttccttcagagtttctccctttagaaggaatcctggctgggcatgatagcctctgcagcacacagatgtcagcctcccaccaggtccctttcagtcacattcatctgttttcatttgctctaacaaatacctgaggctgtgggttttgaatgaaaaagcatcatttacttcacaattctaaagacttggccacgtggttctgaacagctctcatggtggctgtcaatgtggccaggaacataagcaacgagagataacatgctgagtcaggaagtcaaagaccacagaggggatagtctttctctttatataagaattcagtcctaaaggaaccaactcattgcctgagaccagcattatcccgttccttgggcaacatccttaatgatatgagggcgccttttcctctaaaaggtagttagcctgacaagactcaatatatctggagcctcctgtgctcatatcccactgtgaagtccagttcccactaaagggatgaaacatcctccacttaaagtagggataaaagatagaggtaattttggccacatgtgcttgctagcctggcttgggtttggggacaccttttttttttttttttttttttttttaaaaagaaaacaccttgttgaattattttttccatgtgttccctgtgtacaacaccaacagtattcttttccaacaattatccagtcatctcattacaactcttaataccccttcatccgttgaggcctgtgcttctggcatataaactttttggggaacacaaacaaactgaatataaacacctagggacacatttcagctccctttagaagctgagtcttctgtgtcaactgcatcaggcccacccacaacagggactcctcatcatttttgaagttgcacagccagagaatgagctcaagtctacacaaacccttcgtcaactctagctgtgcctggtcccttccttaagatgcatgcatggaggctccttaagtaccaactttcacaactcaaagctgcactgttaacaggcttgtctgagttccctctgagtgccaggtagtcccaatcaacattgagctaagagaaatccttcattttggttaaaaaattagattaaatgtgctttttcaagtgaatttagatattgcaaagctgtccttgtcttgtaaggcagttacttctaagttgaaaaaaaaaataaatgaagtattttcttggctgtttttgttttttaaaaaatcagagtcttaaatatttcagccatctgttctctattatttctgcaactctgtgctgaatatgtagggggtggggtgggagagatttaaatggccattgaaattgttttaagtaattaaaactgataaaaactgtaagtttttacctaatccctggatgatttgattggagtcagccagatgtaaaaatgcctgcgacaaattattctgtgcctatatgacatgcaattttgacaaaatatctttaaaacagctgctaagtatgcgatctggggatttgacagtgcagaaggacaattccgtggactcaggaaagcttggcaaaaatccagtctaactttggtcattagaatgaattgtgttcattcaagatgaaaccatgtgtggataatgggaaagcaagtaagactcctgacttttctgtgtgcagctagtatgctgttggtgcatatggctgggtaatacaagagttctggtcaacctcttcttttctaatccgtatggcattttcctcattgagctctctataattctaacaacagccggtgcatctgtgacacccatcttactttctgcaatttcttgcttaaatgtgactctattttccaattattggctttgacacttactgtcatatgaccttgagtttgtcatttagctcataaaggatgaatacacacacacacacacacacacacacacacacacacacacactaaatgtctgttatgcacataaactcacagtttgggagagagaaaattatcaatgtatattagcctcctcttatgttctctgtcaacattctagaggaatgtttcctttcaaggatactaacctccttaagttccctgatagaaatttgatgtgtttctcaaatatgagagagtaaatggttggcaagtgaagaaatgaaacttattttctcagtatctctcctaccaacactgattgtcccaaacttaaggatctgtcctagttcttgccagtatgtggtgaatgtccatgatagggttgcacccatcctatgcagcatccaccactttgtcagaggacctatgcccatatctgttcttacttgtttcagcgtatcacgtgacttcatcctctgtgctcctgaggccttccttccctttctgctttctcctggccaggccattagtgatttcatcactgtccctagcctataactcatccctgtatccaccatcctgagaaagaacactttgcttggtttatcagcatgaggattgtggtggctataactcacagctacttgttatttgctaagcactttaaatgtgccattctgtttagttctcctgacaccctttaacatagatgctaagtatttccctctatagtactgaagaaactgaggctaacttgcttgaggactacagcttagatctaactctgtgccttccaggcaggctttgtgaggaaatgaagttcacagaccactctttgcatcccttcagaactgggaccccacgactgatgtcttttggtcttgtccctgtttctccagttgaaacttgttgcccctacacatggtttcttctttcaaatgtcagatccccagagtgctggctccataccagcagttgatgatgctttttgcttcatgatttttctatgacagatcccatccagtctcattattttaattatgactagagttgctgatgaatctcatagccatctctcttgcctggacaattccgccaaacttccagttaattacctcccagagacattcttgcagatgaccacaggcacctccagctgaacctgctcttcctgtagttttgatttccattaatgatctccctacttatttcacctctaatactagaaagaaatccgagattcattttaagttcctacctcacctcatcttcacatctaatcaatcagtgtggtcctgacattttctctcctatcgctggacagaattctttactatcattacctaatccctacactgacacttgtcagccctcaacttcattcttgcagtggatttgtagggtggtgtatgtctgaaggtaaatgttgattttgaagctgtatgtaagtacataaaagaacacaaatcataactgaattcacaaaggtagggaacacttgaccaaaatgtgatatataactggcaccctgacaaccttttttttgcatactttctgcattaattctcattctcaataatgggatttttaagagtctctcttttctgtttttgaatcttatgtaagtagaaccatagtgtatgtatgtgtatgtgtgtttctgaccttattcttcattaaaaatagtatttgtgagtttagctcattgtatttggtattctgagcattcattattttattcttgcataggtggcattgtgtgtacatacaaaacatgttcactctcttctaaagacttgtcttgctacctattttagttttactgaacaccgctgttatgatcattctatacgtgtttgtctgtatagtactgtgactctattcctttagatatataatcaagaatggagctattctttgagttaaacaggtaccaacagatagaatgggttattgttgacagtcttgcaatgttaggcattctaatgttaggcatatggagagatctcactgtgattttaactgcattatactgaagattgttggattcaacaccttaacacagacacacacacacacacagagattatgtattttctttctttctttctttctttctttctttctttctttctttctttctttctttctttctttctttcttcctgtctgtctgtctgtctgtctgtctgtctgtctgtcatatatatatatatatatatatgaaacaatgttcttaaaatattcattttaatatttcctagctatattctgctctatgttttggtcacatttaaaaaagaatttattcattgaaatgaaaatattcttattttatttgagaagatatattattctacattccacactaagcctatgtaatctgtctaaggtgatttttttaaagtgagatgttatgtggagatgatgatgacccacttcatccatatggatatcaactgatagtgtatgatgacaaaagtattgttgcctcaattcattgtacctttgcaatgtgttaggtgactgtaaatgtgtgggctcatatctagctagatcccccattcttttctgttgatatctttgtttattaatattttgataactcattgtcttggctatgataaatgtatattacattttgaaatccgcatgaatgctaagactctttaagcataaaactaaacaacggctaattattatctcaggtatctgtgagtgtgctaggcgctggcagagagttgctgagtttggcaacttgtctctatttaagctgtgaatcaggccatttcagatctctgttctggaaaaagcatcttccagaattaaggattctcataggaagggcagaagggtaataaggcacatcctgctgtatatggatttaacaagctgagtgttgagagcagtgctagaggcacaggaaacatgagcaaaaggtgctgtgctctgtgctgaaccccactctctctttataagttttgtactaactgtttaggctcctgcatacttctctatacatgtagacaagcatgtcaactacttaaaaagaaaaaataaactttgtgattttgcccccatattttcattttctatataagaatttcgagaaaacttgtcatttactgaaaataaaatttccagtccatgagtcttagttaaagccttatccattgaggctttataaaaattaattaattaacatatatatagaatcttaatacagtgccaagactgttttcttaataaaaacattactgtatttttatttgcatataagtaaatgtgtgggcacacatgctattgtgtacatgtggaagccataggacaacccatgagaatcaattctctcattctaccatgtgggttgtgggcattgctctcaggtttcaactttggtggcaagaaccattacccactgatccatcttgttggtctacctggactgttctcagattctaggactcaaacgagcttcctgcctcagcttcccacatgtctgaagcagaagacaaaggctgctgtaccgagccttccagtagtgttttaattcatttacttcatttttgctttctttgattttcatctttggtgagactgttttgtttttcttcagtactggggattaaatccagggcctggtgcacaccaggcaagtaaactactaatgtgctgtatctgccccctcttatttcttgatatactttttctacctttgtttttttcagtttgtctccataacataaaaatactagacaactgtactcattagatcacatgatgctgcctggcacattgagtctcattatctttttatttttcagtcttttttttttttcttcactccatggtggtcagattaagtaatttctactgatatttaattactttcttttttttttttccttttacttaccgttaacagcagaaaaagtgctactaacaccagaacaaagtttttgttttgggtttggcacattttagtgatggaattgtatcaccaatccactcatccatccatccacccatccattcatccagtcatccatccatccatccatcatcaattgatccacccatccatcagtctatccatccatttaactttctgttcctctcctatggctcccttttgttctttcactattttgaatttcttctcactccctcattacatatataatagttattttaatgtttacatctgcaggttctaacttctcaataatcttgggggaccatttatttctcagtatttttgtttattattattttacttcccatttcttcacaatgagcccagacaatatgctctaggcagtctgatttatgtcaattttctttaaacggtattgaattgtatcctggcaggcagttaaattgcttggcatgtcctcctgaacctgtcaaggttgttttcttccttgttaagatgtatctattttggtttttgtcagtcatcttcacatgcggttctcactttcagacatggtacccatgactatggcttgttctttctggagcctcaactggagtctctcccaaagagatggagatgcttacaacgctcccaagcacctaacttctgatctttctgatcagctatcaagtctcctttacctactctttgttagaactgatagaatacttctttgcatatatacaggctagccattgtctaaagaatggcaaagaaactgttttctgatgattgggctttgtaagctacctccccccaccccaaaacacacacaccatctctcagattccagtctgtctctttagtgctgtgagaattgccatgctgggcttggacaccaccttcctgtgttggatctgcagaattctcccaagcagggagttaccacaaatccaaatgcatttgtatttttcttccattagtgaccaaaatcccatgctgcaatattaaaactcagattgttttgtagcttattaattgttttgtcaggggatcaggcctagtgcctgtcagccagtcatggccagatgcagaagtccttgtcatagcacagagaagattgaagtcatcatgtttgccatctgccgttatacagtgtgcactatatcaaggtgggatttgtcctgtttatggttgtaccctcgttttctagtacaacacctgctgcagaattggtacataaacaatatgtattgctttgatccatagccctgccccatctggacattcactaatccactgaggatagatatcatggttcgttgagtgagcaagtatgcgactggtagctggccccagtgaatcttgcttttctcctattctatgaactaacttttcagaatcataaaaagaaagcacaagagatgcaggttgagatgccacccatcccacagctgcctctgatctagtggagacattgaggccttaagatgccaatggtgtgctcagcagccacatgctaacttgagctcggcttagatcccattcctgcttccttctttatagtcatcatttttctaatttttacattcatcaaaatactttataataaaacagtctaagagtagaaggtaaggcataggaataccaaagagcagaggattgtgggaagtcaagttgtacagtgtgcattgagaaggagtttaccttatataccacagttttgttaccatgtgcaatgaatgaggagtgaatggctcagaattccatccttattacagtctgttgctgatatgggcttgaatccaggcatcctaactgagtggtgtagatcccagggtaccctgaatgttaagagtagttggcgcagtctgccatcctaccttgcatccttaactcattatggcaatatactgagcctgactctgggtacacagtgttcttaatagggccctctcgtaggcagctgtgctgttttccattctttaaataacagagaacctgcagctggcaagtcaaagggagtagtaagacaccaaacctatattcagcttgcacagaatctgtggcctgagcccatggaactttgggaaagagactacaacgcattgtgcaacgggaacctcttcagaggacagagatattacttgggctcttttcctaatgatacatctatccaggtgtccttgtatctcccatgtctcttctgactcattagtgcaggtgacaagaggcatattgtgcaccttgttgtgaagtgggattcttgtcacatccctgcttctaataacatcacattatctagacatcaagaagtggagttggggagggatgcacaaaagatactaatcaccagggactctgggccaattgaactgcatgcttggccctatccataccagctttgtagatttcagctaatgagtctatcttagacttatccccctccttaggaagcagaagtgtcacattatcagtatagtagcaggatactgtcagtgtcataatagtaaccaagaccccaaggtcagagatgaggaaggtttaattactgtttgaatcccttggtcattggcctacacagttccttctatcagagcccaagatagtggcacatccactatctggaacccagtggtgaccatgatgaagaatcaagacagtttcagtactttcacttgaaaactgctacctcttcttatctctttgggggtggcacaatcagcattgataagtaggtcaagatggtaagagggcagagtcaacagcaaccacctggcagatggaggctgccaggtggagccatggaggagggagctgccataggtcaggtcactaagagcctgaataatgcattgtccaggtggactctggcatgcaggcttctgacttgctttggttatcaaagttagtaaaatatgagggtgatgaacttttgctttgctgaatggaaacttgaacagctactgggagagtaaacaacccttatcttcaagatcataaagtgatatacgaagattaaagacaggtctgtgtgcacgtgtgtgtatgttcatctaagtgtataaaagtgtaaggaaggttcagaggccatgccaggtatcttctattatattttttgccttttttttttttttttttgtgaaaagtctctcactgaacctggagctcactaactttgctaggttggatacccaatgagctcccggcatcctcttattcctgcttcttctgagctgggattacctatgtatactactgtgcctgacttacatgggtgctggggattgaaactcagctcttcatacttctgtgatcaacacttccctgactgaggcatctctgtaacctcaaagacagctttaaacggacaatcctgtcatctagccacatttgaaattcttctgtcatttgtttgtataggaatttggtggatactccaggagaagagagtatccttctattttacatattttaaggtaatgttgcatccacaatcattttgtgtattcctttatggtcttggacatatttataatttaacagtctcataaaaattttggcagtgaatgtgcactcctgtgttggttttctcatgctgtgtaagaaatgacttcaaacttggcagctgaaaaccaaacatccattatctcagagtcctgtggtccagaggctggggcacagtgtggctctgggcggagtcccaagtatcatcagggcaaaattgaggtgctcgccaggctgaattcccatcttgaaacttcagagagcaatctgcatccatgtgcatccccgtgtctggctgaagtctattcctggtctctgtgagacggaagaactcattcccttgctggctgtcagcaaggtgtcacccgtggctgacatgcaaccttgttctttgtcattagtcacctttcatccttggggtcagctttagagcctctaatttgactaaaaacctcctgacttcaaatatttctcatcaggacgagcctggattctttgaagggctcctctgatggtcagttcagcttagcacaatcactttcttagagctaagtgtgcccagggagatagccaacgcagaggagtgctgcccggtatgtgatagctgggacttgtattccagctcactgtccttcattgcaaccctattcatttccgagaatggccacagcacagttacacaaaagccagtgtcctatcacacaacagacagtcactcttaacacagtttagaaaatgcgaagcctctctagtcaagttaatggagcccatactccctgtaaaatctgggtgtgagaggaaaccttatctttccttttcctggcttttagtggtttggggacataagttcaaacttatatatggaacggtgtgtccattcaccttcacctgctgctctctctctgccttcccttccttaaggacactagccatgttagattaagatccaccccgctccaataggatgcctcaccttattgtattagaggcagtcttatttcttgcaaggtgacctgcggtacggggtgctgtggcatctgagtattcttaggaggaagcatgattcaagctgtaatagcagtcgctttaaaccgtgttcttaggttgtttcacaattctgtgtgatagatgacttctaatcatcacattgactaatagttctgttcattgttttctaataatggagtccttgaactgagacccctgagcagaaagattctttccagccagaaaagaaactcaaaacttgaagtgactggtgctgaggtggctctatgctcacgatcttcttctttaaaaaaaaaaaatgtattaattctttgagaagttcatacaatagaatttggccatattccctctgttcttcacctaatcccagatttaaccatcctcctcgttccccacccaaactcctgctctgctgctctctccctctcttcctccctactaagtttaatctgtgctatccacatactctttggcattctgtgtgctccggagcataattgacctatcagaggatggactctgtcttagtcagggtttctattcctgcacagacatcatgaccaagaagcaagttggggaggaaagggtttattcatcttacaattccatactgctgtttatcaccaaaggaagtcaggactggaactcaagtaggtcagggagcaggagctgatgcagaggccatggagggatgtcctttactggcttgcttcccctggcttgctcagcctgctctcacatagaaccaagactaccagcccagagatggtcctacccacaaggggcctttccccattaatcactaattgagaaaatgccttacagttgtatctcatggaggcatttcctcaactgaagctcctttctctgtgataactccagctgtgtcaagttgacacaaaactagccagtacagactcctaaagaaaactggctctcttcttgtagctgtcaattgtcagtagctccccagctgggatggagcttcacacccacctccctggacctccacgctgggattttgtccatctttagcccctgcagattttgtgcatgcattatgtcccattccccattcactgtgtttatatgtgcaatgttcctcttgtgtgcagactcttctctgtttccttctagccatccatagcctctgacttatattttactgttcttccaagatgaactctgagccttgcggtaagggcttgtggaatagatgtctcagttagggttgaacatactataagctcttaatctctgcctcaggaccatttatgatctctttgtaatacttgccatgtgctacaagtaaagcttctgtaatgatgagacatgcactaatctacaggtgtggtcatgtcatcaggatcattttaatactgcatccttctagcagattagtaatattaattctcccccagggcaatgacctttctagccatgtagtctttggcattataatagtgcccaggtatgggttctaccccacagagcaggccttacacatcttataaatcttccatataagtaccagttccatgtgattctgtggttcaaataagtggtgtctttaacaatatagtcttatggtcaagttcttaaggataacagagagcaatggcagtaatctataatgtttggagctctattggacctcagtagccaacaactcaaaagaggtaacctattactgattgtctttgttagggttttactgccgtgaacagacaccatgaccaaggcaagtcttataagggcaacatttagctggggttggcttacagttcaggggttcagttcagtatcatcacagtgggaacatggcagcatcgagacaggcatggtacaggcagagctgagagttctacatcttcatttgaaggctgctagcagaatagtcactcccaggcagctatggctagggtattaaagctcatacccactgtgacatacctactccaataaagccatgcctcctgacagtgccacttcctgtcccaagcatataccaactatcacactgatactagagtttttgtttctaccatatggttttcaatagggtcatttatatgtgtgtatgtctctgtgtgtgttcagggttggggcacatctgtgtgtgatattttaggaggcttctacagtagtaggtttccatatgactttcaagaggcatttagtactagctattcctctccatattccctcctctgaatagaaagaatagtagcactagaaaaagaaattccatttcttaaaatcacaggtcctgaggtggctaattgtttatgtttttttttttctttttaagttttatgttgtacctgcagaacacatttttgagatattagcaacatttcatagataaagcaactgcagtacaggaagaaacccatctagtgtatttgttaataaagacccagcaggaaagacagtctctagatacttcaaatggaaatggtttcctataggaaagtatttgtttatagggatataaaaatgaagaactcctagtagctgcttgggtccttagactgggtaattgaagatggtgactttgttactgggtcagggcattgggcaattctgtgttgcactgttttttgtcaaccccactgagaggcatggtgctttgtggggtgactttcctcagttctcaccacaggaccggaatgaaagcctttctcttctgagttcaattttctccccaatacgtggaaggagtggggagagatggtctctgagcttcttcctcaaaatgcagaggttgtatggttcactgtgtgggaaaataatggagctgtggttatggtatgaggaacaggagcagtcattaaagccatctgttacctcatggttttccatgcatccactttgttcccagaaataataactctaagacttaatatctcgtgagtaaatgtctaggtcagaagctttgcttattctctgattagcccataatttaattacccctttattctttatttttctcctttagtctattctaagttatgtcatgtggctggttacctgatctccagtttaatgcaaccatcttcttgtatgtctggggcaaatctccaagcctgactatcccaggaatactcactctgcaccagaatttctacttccctactgtgtgtctaaactaacaggccaatagcattttattgacataaagtacaagagagtctctctacaataatcaactggtctttgagaactgtttgtttatgggcccattgcacattgctctgccaactatagcaagaccacttgcagattgagagtggaggtataggtatgtcacctggatttgatcttagatttcactcctctcactcctggtaatgatttctcttcatacccctcttttcctcccttccccttattttatttggggtactctatttcttctggtttcattccatggacctacagaatgggctgtaacagtgctagcctcgatggtattccttaaagtctttgagtatataatctgtgtgtttgcacatgaatacgcataccacagcaagcatttagaggtcagagagcagcccttagaagttggtccttccctcctccttgtgggacccaggtatttaacataggttgtcggacttgatggcaggtacccttacctactatgctatctcactggcctactgaccttcttcctcagtggatgaacagaatagttttttaactgccactgagcagcactgggtcctttctctgttggtctttaaatgatgggagtggaatggtggacttgctgcaggatttagatagccagagctctgcttggtgttaaagggaagtcaatccccatgcctgtggactggctgtggggcagggcttcccagtgttactttgtaaagaaatgtcattagaagaattgtcaactgaagccaagagtggtgtctttcttcctcagagtgctcatgaaagtgtcagctatagtgagcagcgccttaggattcagaattgctgaccaagccacacctcttccaccatctttctaaggagccttagacctggctgtcattgtccatgtttctttatagagagggcagtgctttgtagagtgggggaagggggtctttattctaccaattataatatacaaggcagccattctggggcaaatggaagtccttttttcacactctctccaacctggggaatccagggtcataccctctctgttaaacaagaagggatctggatctgtagagggttcagtatgtcaggagagcactcatgaggtagagaagagagaccacactcaacactctgtggacaaatgagccttcatgccggcctcttacagtttcttcagcaggcatggctgctttcctcctaaccttgggttttccgcctgtgcttcagtgttttggctgacttcctgggggatgttattgagcattccatgctgagaggacgaggcccatgctgtcttggtccagtggcttgaagagtctcaaagtgattcaaagtgtagctgtcagagtgagcacgtagtgagaacacgtagagtagagagcaaaaggcacttcattcagagttcagcaagactcccacggagggtaggagaatctttagcaaggcaggtgggtgtgactgttgaatgggcatggtgattggcaggtgtacctaggtgaatttgggataaaaagaatggagtaccaaataaattagaattagggacaaacgcagtgttctgggctggcccacatttgcatccttttttgctgtgcaatgactgtgtggcttcaggcatacacttctgacttttactgtccatatctgtcaagtgaagagaaaagaagttgcagttctaatgccctggggatttaaatacttgtaagtgtggcatggccttgagccccatcacatgctgcttcagataggggctatgaaaacagggacaggaaagataataatgccgtgtcttccatctgagtccctccaactctccctgggttatgaccatttcagggcatcctgtcttttcaggaactcccaggtctcactgagccatactcatttctttttcttttttgaagcaaggtctgacgatgtatcccaggctgggctctgtttgctatgtggctaagaatggcttttaactttttattctcctgcctgttatctccagagcctgggataacaggtgcttgccaccacacccaatttttatgctgtgctggtgattaaaactcaggagcatttgggacaagcaccctctgccacgttctttgttgtacaacttctggtcccaaattcaccattgccagctcttgcagaagctgcaactgtcaatctaaagcccagggaggcgtgatccttcagcaagactcctccccctggctttgtgtattctgggctctggaaggtgtgtggagtctaaggattcaacaaaggaataaaacctctgaacccgagatctgaaccgaaaagcatcctccaattctatggccccatgatttgttctgagtaacgcacttagcatcccacggcaacgcccatcgatgctgactaattccatattgtgtgggtcatcaacacctgctgttccatcatgaacctcatctgccttcctcctattccggtttggataatgtaccttgcacctacaggactttctccagaaagagcagaaatgactcacattattgccctaaaaccccatggaaatgtattaccactcgcttcctccccagcgtgataaatctgattataacttgcagacggccactcgtggttgcgcagcggtttaaaatgtacgaaaagattcattcggctaaactgaacttgtcaggtggagagcccgagggaattcttgctgcagacacaagttgtgttctgtctgctgtagccttgtggcagctttcaaattgctgttaggaaataaatccattcatcagtatggaccgccccctggctctgccagactccaggctccttggaggctaaatgttcctcctagtgtctcacctgtcttacaacgtctgcaataatatgcccttgataatggatttctttttttttttcatttttaacattccagtcttataaaacaaaacaaagttggccaatatgatagatagaaatggcccccaatactactttgtctgatccccagatatgggttctgatagtcagacaggaacagtgacttcttctgggtcatacagatagaccatcaggaaacatgcaggggtagaacctaggcccctatgtatatgtagcagatgtgcagcttggtcttcatgtgggtcctttaacaattggagtgggggctgtctctgacttggttgcctgcctttgtatccctttcccctagctggggtcttgctgcagcttgaagtgccagggtgggttagaactcatggcgggggagggggagctactccttccctgaggagaaggggaagtaggagggaaggggagagagaaggggttagaagggtggggctgggaggagaggagggagggagctgtggtcaggatgcaaaataaatacataaatgaataagtaaatacagaaataatcaatgaaggaaccctgacttgagggctgggaggtggctcagtcggtcaagtgctaactgctcaaggatgtgggtctgagttcaaccttatctcctgcttccacatgaaaagccctagtgtagtggtgtgtgccagcagtccctgggatggagaggtgggcacagaaagaaccctaaggcttgctggttggtcagccagctagtcaaatcagagctacaggtccagcgagagaccctgcttcaaaatgtaaggtggagggcagctctgtctgtttccatacaacaccggctaccaacagtcttctgagcttttcttggctgctcctgttagagaaaagtgggaggggttccatttaggctttgctctcctgttttacagtctcttttgaataataaggtcggcttgtttaataagttcaacttcaaagtaggtcagggactttatttctgtgcatggtccattagcattcttaagtgagaacttttttttcttttaactgagaaaacatcttctgcaagctgagatagcccacgcctcctatctccccagctgccttgtcagattcttgtactcactgtatgacccagggggagaggggaagggttcccctaccccagagcttccctgcagtggcagggctaagttggaggaacctgaggagaccctaggagatacagcacatgaagccaaggtcacattaaatgaggtgtatattttgttttcgtcaaagagaattctgcaaaacccacaattgctcgagtagagagggtcgatctctatgtcaagaaacttctcaaaccatttgtgactaagttgctttccaggatctgtcacccagtagccccacaggtagaaaacaaaccagaggcttgggcttagtgctgatgccacagaggaaggacagggagatgacaccttttatataggtcggttactaaggatatcaattttgtatttttagcatggcctgaattgttgtgtgggctcattcctttatcaattgcctttattttttcttaaccctacaagggtgttagaaacatctcttaaaataataataataataaaaaaaggttggttcctattcagaatccctgtgtgagacactgtgcttggctctgtgaagggcactggcatgactggcaattgtccccataccatggtaactctattgtcagaaggacacagacaagaatgatggcacctcgcagaatggagcagggctagagtgggctacaaaagcctccgaaagaatgctccacgcttcatttgttctgtgctccttgattcaaggttttccccatttctattctctgatgtaatacctttgcttgtaaaaaaaaaaaaaaaaaaaaagacaaagaaccgccccctaatctttcagatgggactttatatcattgtaatgatactactgtagaggaaagaaatctggtagtttttcctttacaagttctcatttatctttagctgttaaaatagtggatgactaaatggttggccataacatgctgtttcagaacttgtcaggctggtgggcttcaggattttttttttttttttagtggagagttgaagggtaggctgttttagctgggtatcaggatcttgcatatttcagatatgatttgatacgtgtgaacatctcgatgtcaagtctgacttgctgcgaatgtgtgaaacatctcggtgtgccgggattgttttgggtgagtatgtactgattggcccctatactgttctgattcctgctcttcctgttgtttgcaaagaaaactgtgagcttggatttcttctctgctcttactctcctccctggccactacatcaccgtgactgtttaatccttgcagacctatctgaaagccttggaagcatcattgcatcctgtggtgatttggatgagagtcatccccttggctcaggcgtttgagtacttggtccccaggtggtggcagctactggtgaggtttaggatggtcctgggggaagaaatagggttctggagcaggctttaggagtgtctagcctggggtcatagggatggcttagttgttacagtatttgctgcactggtagaagatctgagttcttttcccagtacttacctggcacccctcaactgcctgtaactccagttccaggcctttggatactctcttctggcttcctcaggcatggcgcatatacgctccatttatatacatgtgacaaacactcatacacataaaataaaacattttaaaaggagagtatataggctcactatacttgcagtcactccctgcttcctgcttgctgttcatgatatgagctttctccttcctactccagctgccatgttcgccttgctgctatgcctccttagccctctggccccacaaatgcgaaggaacacttccttctgtgagttgcatagctatgctatcttactacaataaccctttcacaggtgctgcttaagaccttcggaaaacacagatacttttattatgattcataacagtggcaaaattatagttctgaaggagcaaggaaaataatttcatagttggggatcaccataacatcgatgggtggcagcattaggaaggtaggtaaccactgttctagagttagtgatgttaagttcacctctgtgtatctaatgccagtatcagaaccagcagtggatgcacatgtgaatgaatgggtaatgggatggtctcctgtctcattctggcttgggatttatagtagttattttctattttaggtcaaaaaccactggtctagcaaaaggtagctagggactcatggaatcaggtttgaggaaggatttggatgaagaaaggaatatgaagcctggtgctacattttctgcatattggaaacacttggggaagttgaaaccattgttagtacctgggtttaatttcagagattctgagtgacttggtaaagggtaagagctaagcctcaggacctaaaacctctgcagtgtgatcctaaatacagccaggttttgggaattactggtgtggccacaaaagctattttctaagtatgatgttttactacaaggacctttcatgaaagaagtctttattcttatgtaggggatattcttgaagggacctgggtgttagctgtatagatctgagaataattgagtggccttcacctacaggaccaagccttgtggtttcaatgatgactctcccattgcttagataaacccagtgtatgcttcccatgtctcacgaagatggttacttaacttcggagccgaccacgaggccaaaatattcccacagcacctttctggatagaaagggtcatggttgaatacagtctagctttcctgaaatcttcctggctctccagctagtagcatggaatctaagtcacatttgcttcctttaggagagtaagaagtaggtgagaaaattcatgaggcagtttgtagaggccataaagtcctccaggctggtagaaatgatgccattaaagaccgaatctttaaaaagtgttaatgctttgggaaagtcactcccatgaaccagtgtcccttcatgtgtgtgacataaactgtgttactgattaaaatctagttgtgtcttttggcaagactaaaaaaaagtacacacctttggtttttgtatgtgatttgcttctgcttctttctctgtgtgtgtgtgtgtatgcatatttattctaatgtaagtaaatatatatactatataagtagttacacacatacatatttacatatatatatatatatatatgtatatgttttatgtatatacattcttacattagattttctgttactttcccatttttgtgatatactgtgtgccctagacaacttaaagcaaggatgacctttggcttgtggttcaagttcattgtgaatgggagggtattcaggaagctcacacagaagaatgtccagtaagcattagtagccaatcactttctccttgttttcttccatctgtgacctgagactatggggcttgccacccacattcatctcccttggtaaaacctctctggaaatccctcagagcccccctggagtgtgctttatgaatctccaagcaactctcagtctagttaagttgacaacggagatctaccacaagtttcatatatcataagcttattcctgtacctcatttgcaaacttttcaccagttttcttcctttcaaataatttagaaatcaattccttatgagtattattgaatattcaaaaatacacaaaacaccggatgttaattcccacatgtgttttcctcagtgggatacaaacacggcttatcaagtgttcaagtactgttttaaatgcataaaaaataaaaaccaaaaaccaactctttggatgatgtccttcaataacagtaggctgcctctttttatttttatcccaaaaagattcaattgtgtcttttccagtctttgcctgtttgtgagactcttctttaaaggggattctgaaactgatcttaaaagaagtgtcaagctctctctctctctctctctctctctctctctctctctgtgtgtgtgtgtgtgtattgtgtgtggttgtttttttcttcattgtacataaatatttccagttaagattttgttttgtggctacaaaaaatgtatgaatacatacatctaaattattatatgatatacccatggaatatatatgatatattagtcaactaaagcttgaaacagcaaaaacatgatttcatatgactgggccagggatgctggttcaggctgattagtggttctgtctgaggtcgctcagaaggctaatttcagaagtcttttaactatctctgtcacaaagagtcattcagaggtcactcatattggtgtggtttcaacactgtgtgttcctttctatcacaccacttaaaaagtgacatagaaaggagagcagaaaggagaagagtagaaacacaaaggatgggagagagaaagaagtggggtaaacatagaaggaagggaggagtgggagaagaggaagaaggagagaggtgtgggagatggggagaaaagaaagggaaggaaagaagaaaatgtgaggacgggaagcaggaaggagcagtagggatggaagatggtggcattttgtgacctgatctcagaagtcaattcatggcattctcactgctcttatgtcccaagccagttgttatgttgagtccagtctcaaggagacagggttacacaaggctatagatgccaaggacatatgtcaggacctttctagggctgtccacatctcaaaagtgatggccttatgtattgtttaggattttcatatacaagagacaacaattttagcattctacatctctgtcttaatgcaaaatcatatgtcaaataagccctgaaaatgtgtcttacactcttcaggtccacagctcttcgtggaatcactcattagacaaggggttgtactctcatttttcccagacaggctcaatgatgggatgccaaaggacaagattgtattggacatttgccttcctggttgtatgctcttcagagttttactgtcttatatcttatttagtagtctttgaattcccaattttaaacaactatctatcatcctgattgaagccctatctaaagaaatattatacttgtaaaaaataaatgaacagaggcactggaaattttaaaagagttcaggcttatttttttactattctgtattattgacaaaatctctagggtacaaaatagaaccatgtatagttgtgtttgtaactggatgcttgagcacatttttattggtcagggatttgtaagcattactgaatttaggtgggaccaaaatttaatgtggacttgacatcaaaagcatgccatataaaaaaagaaattgataaattgaaccttaacaaattaaagctttttctctctgtgagagctcattcaaggaagataaaagacaagctatggagtaagaaaacatatttttcaaacccatatatgacagatgagtcctatttagaatatataaagcaccattaaaacaacattaaattaaggcaataagaaaatagtcaagatatatcagcaggcatttcagtgaagagcttttgtagatgtaaagtaaactcttaaagtggtcagtcactggcttttaggggattgaaattaaaaacgctgtgagctgttattatatagttaccagaatcatttgcaaaactaacaccatgatacaaaaataggaaagggcttgttgagaaaagggggtccaacaggagggcaatagtggaggataatggggcaaaaatgatgaaaatacatgtgaacatatagaaaaatatcaaagagcaaaagaaagattaagtgtgacgaaaggatggaccatctagtgattgccatatccagagatccatcccatgatcagcttccaaacgctgacaccattgcatacactagcaagattttgctgaaggacccagatatagctgtctcttgtgagactatgccagggcctagcaaacacagaagtggatgctcacagtcagctattgaatggaccacagggcccccaatggaggaattagagaaagcacccaaggaactaaagggaactgcaaccctataggtggaacaacaatatgaactaaccagtacccaggagctcttgtctctagctgcatatgtatcaaaagatggtctagtcggccatcactgcaaagagaggcccattggacttgcaaactttatatgccccagtacaggggaatgccagggccaaaaagggggagtggtgggtaggggagtgggggtgggtgggtatgggggactttttggtttagcattggaaatgtaaatgagctaaatacctaataaaaaatggaaaaaaaaaagaaagattaacaacaccagttgtcaagaagctggatccttcctacaatgttagtgggaatctcccatgttctagcctctctggaagtcagcttggctgtcccaaatttcatacaaaccaggaactggccttcttagtatctattccagaaaagtaaaatttgaagatcacagaaaaaacctgaaacttgctcctaatggcttcacgcatcatagacaaagactgggaacagttcaggtcaccttcagcaagtagactatcagagtgtgcactcagagcgtgggaatctgttttacaataagagggaatgcacacctgaatccatcttgcaggtgtgatgctatggagaaaaaaagattaattccaaaaagctatgtatttcttgagagggcaaagttgtagaaatgaggaagagattggtgacccctgttgattgaagatgaggtgggaatatggagatgaggcagttgtggttttaaatatcagtatgagacccctgggatccaagttcatcagtaatctcttttttgattaatttttaaatgcctctcattttattttagtttcttttttaacctcatagttagtcagatactattttataaaaccctgactatttatttgatattcaggcctatcacatacatgaattgactttgtacatgctgtgaggaagggctcaacactcaggtttatgtcatgcatcaatgttgcactgagcaccattctcctcccaccacagagcagtggcaactgcactataaatcaactgattatgcatggatggatatatttctgggttctactctcttctactctcttcctcgatctattcttataactgttattgaatttgtttttgacaatgccttacatatataatgtacattctgattactgtaatccttcccacactctctagtctctctcccacctactgcctagcataaatctttttctacattcatgctatttaactaggattttctgtgtgactataaatttggaactatccactggagtctagtggattcttcaatgggcacacagtgaagatgatggttgcctactctctagaatctattagtagccaacagtttatcaggggatgataaagcctcacgagtccttctctaatctgtgattgactgttaataggcccagtcttgcataggttcactggagacaggaacagatgctgtgaggtcatcactgcactgtgtataccaagtacagaggaaactgtttcagagcctgtcttctgctctcccagtttctacattttattcttccctgtcttctgcaaagactcttgagccttggcggaagaggatagagcaactgtcctgttcagagatgagcactcgactgtcatttattttcacactttgacagtcatatgttcctaccttcaccgctatcattggaaagcgaaattccgatgactgaagttgagagtagcatttgtgtttgggtagaaacataaacattttgaaggcagctcaggagcattccacaagtaattttgccccctggtcctaaggctctcagccatgggtttttaatggctatattttaaaatatgtatttgtgttttaatggtattttatgtatgagtatgtaagtgcaccatgtgactatagtgtctacagaagacaagagagattatgagccttcatttggttgttgtaactaaactcaggtcttctgcaagagtagcaagtactcctaacccatgagtttttcactggatttgcagtccaaattatgaatttcttggtgtggaagtggcctcaaatagggtcagagtagttggttataacaaggataactgtgcctctattatacttgcctggaaatttggtatttgtcttagtttggtttctgttgctatgataaaacactgactgaactgacttagggaagaaagagtttattatatctacagaaatcaggacaggaatttaatcaagaacttggaggcagcaactgaagcagagactatggagcaacactgttcagtgccttgcttctcctggcttgctcaacctcctactcagagctggcactccctacagtgggctgggccttcccatatcaatcattaaccaataaaatgcccacagacttgcctacaggctaatctggtggaggcaattccttagttgaggttttctcttcccaggtgactttaatttgtgtcaagttgacaaataaccagcccagtattatagctgatagggtcagaactaggtgaggccgtcgatgctcttcatcttatttctctatttatagtcagtaccatgctttcttaatcacgagagcttgatggtaagtcttgatattgatccgaaaagataaactttccagcttttccatttttttcaatattatttgaagtattttaagctttttccatttttatataaatgtcagaactcatttgtcagattttctatgaaactagtataagcaaaaagatctcatgtagttcaactcaaggttcaccaacatggaatttttttcttattcaaacatataaaacatatttcagtaatgttacatagctttaagtatagagaaatatatgaatatatataaacaaatgcatacataaatatatatatgtacattataaagtatctttgttgaaactttattttattgttgaagcataacacatgaaataagtgatacttataccatttgaatatctcaatttttctgcaagaacccattcatatgcctgtgacaatctgctcataaacattttcagtagtctatataagtagaagtagtcgatgctacttctgagtcagttacctctaccaaaagtgagcattagtacattttctgttattcagtaaatgatatcttgtatgttcatttttataatattttatgtgccacagatattaatatatggaacctcgctaaaatattcttgcttatcatattttgagatttcctggggagtggtttctacatatacaattctgtggtctatgaataaggaaactatcgtatttgcttcccatctttatgttttctccttgtttcattgcactggctagaacatccagtaggaacagcaaggttaagggaaaactttcagtaatgtactgtcaattatgatcttaggcttctgttttgtatgtcctttactacaataaggaacttctctcctataactttattatacatgagtggatattgactttcatcaaatatttccttggcatcttttggaatgattgaataaatttttggaaaatgtcctgcatgtatacaaggtgtctttgttacacccatcctaccccatccccagcttcctcaaccttgtaaaacatagtagcctcaggttcatctctctctctctctctctctctctctctctctctctctctctctccctcccccccctctctctctcttgatacagtttctctgtatagccctggctgtcctggaactcactttgtagaccaggctggcctcaaactcagaaatccacctgcctctgcctcccaagtgctgggattaaaggcgtgtgccaccatcgcccggctcactctctctttctctcttatcaccctaagttaaattagtgcttctcgtaattattattgagtcatccactgggacatgggcaaactaccagtggctatcacagccccaaataaaatggctcttccttccccaacagtcatcagttgccatgagctccacagccaggagagcatctgattccccttcccagttcttggttagctcttgatcatgtggggatcttgtgtgggtaactacagctgtactgagttcacttatgtaacagccacttcacatccagaggcctttttagcgcccctcccctccctctgtcttttacatcttttctccccttttcttcagtgattgtgtgatttttcctgacagctttcctggtcttaagccagtcttgtttttctcgttataaaattaacgtgatcatgaactgttctccattttattaatcgattgcttttttttttattgtgtagggtatcatttctgtgcttatcagagatgcttctcagagttactttttgtgtgatacccttctaaagagttggtaattatcctggattactcaaatgaatttggaagtatattatctattcatatttctagaaagtattttcatgaagatagaatttcattgaaattttttatgtgtataaaaatttgaaaataccctccctgtaccatcatgtagaatttcttctatgaaattgttctgcctaaaactttgttattttatataacttggtggaagccaatggatatctcattgagctcattgtgtctatgttcaggaaacacttttctctgttaggaatatctagaatattgaagggtcatgaacactgggttttcacggagctatagaagaaagactgtgggagatgttagcatgaagttatcgtttctgctcttggagtccagatcatctatatgtttaggacagagtggtgggggatgagactgctgtgcatataagactttgccgagttttgcagaattcttttgttttgaagtctttgtgatatgagcagttgcttaggctctgctggctcatctctcctggcagaatatggcagagcacagagtcagccctatggggatgagaggagatttggaagaggctaatttttcagttcctttacataaagggggcaatcatctcttaaactctccatgcaaactgagcagctatgtggataagcttcttaatccatctggacaccccttcctgacacttcagatgaatctatacttttagtcacttctagccatttcagcagcttagagactaattatgcatctcccccttgcacatagggatagaccaaggagagaaatttgcaaaataacaatatctctaaagccccagcccccactctgtgtaagcctttctctctgtgtctggtagcatagcaactgaggaagcctcctgatctgtagttgctctagactgcgtgagtcttcccttgctctctacatctccttttcattgggttttctcagacttattctagtgtgacagcatcaatttttctcctggtacttgttgactctgagttgcagatccgtgtgggagagaagttgtttttttttcattcatggacgtgaatttgacattttcagttccgtccaagatgctttgagtatccagatgctcagactctagacagcaggaggcttgagagcctgcattattagatgaccattgctggcctcagaaagggctttggaatggagagaagagccactgtaggaaacaaggccatcagctttgtccggtttctgtaatttacatttgatcttcactaagacctatcaagaggtaggctctgttacccagttttacatatgaggaacccaaggctcaaggtcatgatgtagctttcccaaagtgacataactaagccacagtgatagcaaaccaacctctgtttgacccagtgatcattcatccgtttaattctccacactgctctttgaactgcaaagaaatgatatacagggcaattgatatagagtggaaaagctatcacagaacattagaacattgggatggaaagtggataaataccagcaatatgaaccatgcaagcattatagaagtcaaagatgtctgtaggaaccgaggaccctcaaaacatgttcttatattggttctgtttcctttatttcttttatctaatcagtggccacatgttatctccatttcatctcctgaacgtacaacttgttcctctcactcagcccatccaacttcaggaactttatattcctcagacctcttcatttcttccctccgtaactggcagctgatgctgacttccttattgatctccaagtctaatttccttctctcagatctttttttctaccccacattcaaaagagttgtcccagaggaatgggcacctgtgttatcccaatgcttacaaaactttgctataatgaatactctacttggttcccattggtctctctgcttcagtttttgctgccttctcatatctcctggatttctgcaggatatgcagctccagagtaacttagacttagctaagaggaacccatgtcatacctgtgcatcctaaagtgtctgctttcaaaaatgtacccatggcttgaactcactgtaaatccctctatgagcgcttccatccaattttggcacctttgcttgtattaatagcctgtctatactataagaagtgggcacagactttgtactctaacccacataaatttcttatctatagcactagaggttagatgtctacaattctattgggctgtgttcatttaactcacagtatttattccttgacttttaatagtttctagaggtcactagaggcaagagtcttgtaggagaaaaaatgtttcttcattcatgggtctgaatttgatgctttcatttctgtccaagatgcttttgagtatccagatgctcagactatagaactcaggaggcttaagagcctgagctagatggccattgctggaaaggactttggcctgcatgcttgcctgtctgcctgtctgcctgccaaggtctctgttcctatcttctaagtcatagagaaatatctttcaatctctttccaatttttttaatctttcttcttcacttaaaatgtctgtaagtgattatgctgagcccacctacatgaaccagggtactcaagtcaatatctgtgtgtccatcatattgacagagttccttttgttctataagtttgtgaataagacttggacattatttaaggactatttttctgtatatcacagtcctttgtaagccatacagccctggtcctatgaaccactgtccattgtataacttattttcattccacttggtttaaatatattatacgtgctactctcaggttcctccaaagcgtagatagcaatttgctctgatctattttactgagaacaagtagatgtggttttcagtaattgttttttgaacaagaaagtttatctgcttagctcttatctatctgtcttgttctgtggctggttagagggttagagcaatggggcaatttggtgtatcagttaaaaccataaattctaggacagtgagatggctcagcaggaaaaatgtacttgccatcaagactgtccacctgggtcagtccttgggacttgtttggtcaagttttagaaaggtttggttcctgtgatctacatggtagaagaggacctattcctgtaagtaacccattaactttcacttgtgagctatacataaaaaatgtaattaaaaaaaaaacagcacaaaaatcttgagcaaggcaatctggatatcttggcattgccatgtactaactgtgtggacaaattacttatcttctatgcctgaactttttgatgtggaacatgaagatgattataaaatctagttttgttatgtagggtttagcaaactgcagaccacacaaggtacttgattgatggaggagtttttacacaaatgatagaaggttaaccaaggaaaagttagaaatgatagtagcccaaaatgtcagaaagcagttgctacatctaagtgttggccatccaaagggaacaagtgttgttatggggactagaagtctagaaaaggagccctggagggctagttgctgggacctctgaaggcggagtgcctttcagtagtatgtcagcagtaagggcatgatctgtgttttgctgatacttccagcaagatgctatgctattgtagcattgaagactggaagaaataaaagctcagagatgctgctgccttctgctacaccatcaatgagataagacaggagcatttttatcctttgtctagctccttgtagggcagtagttctcaacctgtgggtttcaatccctttggaggttgcgtattagatttcctgaacaccagatatttacattatgattcataacagtagcaaacttatacagtagtaacaacataattttaagtatcagggttgtcacaacatgagggcctgtgttaaagagtcatggcattagaaagtttgagaagcactgttctagaatctactattactaggcacctggatatatgatatgaagagttctagtatagagtcacagagctgatcattaaaaagtgagccaaaagaccagagatgaatgacaggcacattcctttagttttctcatctttaaaatgcacctaaatagtatttatcttatggtatagtataagaaatgaatgggttcatataaataaaccctggattagaaacttatacatagcaccaggagattattagttgttcttgccctgtagtatgtctctaagtgtcacatgaatgtatagttaagtatatctggaactcagagatccaaactcactaagatgtgagttctacttactcatttctctataacaagacttctgggcaaaagtggggcagaaggacaaaaggatgcctgtcacatgacccctgctgctttgagacaagatgcctctgcagagtagcctctgattgcaaagattgacaatcctaggtctcctagttcctcctctgagggagacagcctcttgattcatgcgttctgaagacttctgattagcaagtaagttttaaaaaggctcttctagcataattattctgctcttaattttgggaaatggcccagcaaagagtaatcttgaaaattatgaggcactgagggacaaagaggagccaggggcagacaagaggattgcagatcataaaatctcatctggtgctaagttgttactgaattatgcatttgtagatgacttcataggtttcactgtgagactgtgttaagtagattgagcctgggctcctgaatgtatttgtgtgtgaaaatcttttagaaaacacagagacattgctattgattctctatcgagagataggaaggaggatttgttgcgatccttctgttctacagggttagaaaactgggagcactgtactgactagctcactgacaggtagacagatgtactgataaaaatggcatccactttctgtgctaggtaggagtggcctgtttgttttaaatatattggtttatttaatcctcatggcatttcctgtaaggagagtgacattgttaatctattttataaatgaagaatttgaatgtctattttttgtggttttattgttgttctttagaggttttgcttatttctgacaagatttcacattgctgaagctggcctcagacttgttaactactcaaagaagaccttgaacttctgatcctttgtgtctaccttttgagttctaggatataggcgtgaaaccaccacccttaatctctgtgatgattggattggatccaagtgtttgtgtattctagataaatgttctaccaactaagctacatcttcagctcaaatgggaatttgagatatagatattaaataatatgtcattgtttttataataatttaaattatatttctcccaaaatagactgtaaactatatttacaggtagttggtctagaagttgaaaggaattctagtggggatagggaggtgaggcagagaacaaagtaccctgaagggtagattcaggattttgtaatcttgctatgtctctgatgattagtggtttgaatatgcttgacacagtgaatgacactattaggaggtgtggccttgttgggaataggtgtggccttgttggaggaagtgcgtcactgtggaggtggactttgagatcctcctagtcacttgggagatagtctgctccttgcttcctttggatgaggatatagaattcttagctcctccagcaccatgcctgcctggatgctgctgtgctcctgccatggtggtaatggactgaaccaccgaacctgtaagccagccccaattaaatgtcctttataagagttgccttggtcatggtgtctcttcacagcaatggaaaccctaactatgacagttatgacagtgcccctagggggccatctaaaagataggaaacccaccacgccgtcttactacttataaaagccagcaaactaggatatctactctcatccttccttgggtgaaagtttgaacctgggagtatgatatttagtcttggtatatctgtatgccttgtcatgatcccttcacaatactgtgacaacattgtccaagagagaacccaggtgctagaggtaggatgtctctagtgtgcagaggtgccaagcactgtccaggtgctaccaatatctactacatatggctaaaaatagcagagctgggtttcaaagtgatttaattctgattatagcttaaacagccaaaataagagatattcaaatgtcttacagtttggttaaaaaatacctctctccaagactcatctttagaaaacttgttacaaaactggtggcactatttagagaggccatgctgttcatagggagtgtgcttagcagacagaactgggttggcctttgaaggttataccctgcccctagttcctactattttgtttgcttcctggtccactacactatcaactcatgcttttaggaactgaactgaggtgctgtgctctgccttcctcaccatgactgactgcaaccctctgactcatgagtcaaaatatacccttccttcttcgggtattctgtcaggtgtcgtggtcacaactgtgcaaaagtgtagtagttcaagagtggggagatcacaagaagagatggtatagaatcctaagacagctccaatcctcagatatgtaaagactaccacactgaagaggaggaagattcaagagtgcctatattatgtatatatgccctttaagacttgaattctccactttttgcagatgatatgatagtatatataagtgaccctaaaaattctaccagagaactcctaaacctgataagcagcttcggtgaagtagctggatataaaataaactcaaacaagtcaatggcctttctctatacaaagaataaacaggctgagaaagaaattagggaaacaacacccttctcaatagttacaaatagtataaaatatcttggcgtaactctaactaaggaggtgaaagatctgtatgataaaaacttcaaatctctgaagaaagaaattaaagaagatctcagaagatggaaagatctcccatgctcatggattggcaggatcaacattgtaaaaatggctatcttgccaaaagcaatctacagattcaatgcaatccccatcaaaattccaactcaattcttcaacgaattagaaggagcaatttgcaaattcatctggaataacaaaaaacctaggatagcaaaaagtcttctcaaggataaaagaacctctggtggaatcaccatgcctgacctaaagctttactacagagcaattgtgataaaaactgcatggtactggtatagaaacagacaagtagaccaatggaatagaattgaagacccagaaatgaacccacacacctatggtcacttgatcttcgacaagggagctaaaaccatccagtggaagaaagacagcattttcaacaattggtgctggcacaactggttgttatcatgtagaagaatgcgaatcgatccatacttatctccttgtactaaggtcaaatctaagtggatcaaagaacttcacataaaaccagagacactgaaacttatagaggagaaagtggggaaaagccttgaagatatgggcacaggggaaaaattcctgaacagaacagcaatggcatgtgctgtaagatcgagaattgacaaatgggacctaatgaaactccaaagtttctgcaaggcaaaagacaccgtcaataagacaaaaagaccaccaacagattgggaaaggatctttacctatcctaaatcagatagggggctaatatccaacatatataaagaactcaagaaggtggacttcagaaaatcaaataacccccttaaaaaatggggctcagaactgaacaaagaattctcacctgaggaataccgaatggcagagaagcacctgaaaaaatgttcaacacccttaatcatcagggaaatgcaaatcaaaacaaccctgagattccacctcacaccagtcagaatggctaagatcaaaaattcaggtgacagcagatgctggcgtggatgtggagaaagaggaacactcctccattgttggtgggattgcaggcttgtacaaccactctggaaatcagtctggcggttcctcagaaaattggacatagtactactggaggatccagcaatacctctcctgggcatttatccagaagatgctccaactggtaagaaggacacatgctccactatgttcatagcagccttatttataatagccagaagctggaaagaacccagatgcccctcaactgaggaatggatacagaaaatgtggtacatctacacaatggagtactactcagctattaaaaagaatgaatttatgaaattcctagccaaatggatggacctggagggcatcatcctgagtgaggtaacacattcacaaaggatctcacacaatatgtactcactgataagtggatattagccccaaacctagttttcccaagatataaggtacaatttgctaaacacatgaaactcaagaagaatgaagactgaagtgtggacactatgcccctccttagaattgggaagaaaacacccatggaaggagttacagagacaaagtttggagctgagatgaaaggatggaccatgtagagactgccatatccaggatccaccccataatcagcatccaaacgctgacaccattgcataccctagcaagattttattgaaaggacccagatgtagctatctcttgtgagactatgctggggcctagcaaacacagaagtggatgctcacagtcagctaatggatggatcacagggctcccaatggaggagctagagaaagaacccaaggagctaaagggatctgcaaccctataggtggaacaacattatgaactaaccagtaccccggagctcttgactctagctgcatatgtatcaaaagatggcctaatcggccatcactggaaagagaggcccattggacacgcaaactttgtatgccccagtacagggtaacgccagggccaaaaagggggagtgggtgggtaggggagtggggttgggtgggtatgcgggacttttggtatagcattggaaatgtaaatgagctaaatacctaataaaaaatggaaaaaaaaagaagaaagaaactaaaagacaaaaaaaaaaaaaaaaagacttgaattctcaaaacaaaatagcttcatttatgttctgaacaccttacagtatagtgaaatagaacctccctctgataatctatataaagatatagaaattctgcaatagaaaggcatcccaaaggtgccaaggagggccctctatgatgtagctgtagaatttgctgttagtgcacacattaagactttatccatgccagaacactcatctctgtcatgacagctgaaacctcatatttgcctcttgctatgaattgaatggtgttcccttcaaagtcttattcttcctagaaactcagattctaatatatttagaaatagattgttctcagttatgatttatgtgaaaatgagtccatactggagaagagagagtagcctatgctggttgacttttgtcaacttaacacagcatagatatatctgggagggggaatcttacttgaaaaatagttaagttgggtctttagccaagtctgtaggggattattttgattgatgtttgagagcccaggaggaacaagccagtacatagcattcctgcatggattccacactagttcttgcctctaggttccttccttgacttcccctttcagtggactataagcaaaataaactctttctttcttcaagatgcttttggtcatggtgttttatcacagcaatagagaccctagctatgatggacattgatctaatataaactaagatttcatacaaagagggaaattcgagtaaaaattccagccacataagaataacatataaaggcagggcagagggaggcaagactcatgcacaaagcacagaagctcagggatggttgacatgacatgaaagacttggagaggtgatcaaggagtctttcctagagcctctcaagggaaaatggttttgttgacaacttgatgacacatgtctagctgtgggaactgcaagttgataaatgacagttattttcagctgcctactttgtgccctattgtttcagaaggtcctagcagattaatatttcttgtcctaagataagtacctttagttacatgggagctacactgctgaggaatcgagggagatagtggtacctctgcatctagggagactgactaattaatactgtgtaattttggtgcctctgcctaaaactggtatagttcatgttcagagatcctgtaagattaggctgaagctagtctgcaatcaaaaaatcacatccttatttagcaccatgatttcctgtatcctgcatcctgagaattcatctctaatcttttgcttcttcagaaaccttgtctcaggctctgcctctccacctgggctaaggtagcagaactcacagagaacaaagtgtaaggatgagagcatccaggagggcactccacaggagagctaaaatttcaaggacaaggaaaagtgagttagctggagaaaaggaagagggatctagcagagagaggaggacacgcaaaaagatgtctcctgccatttctgtatcaacagtgtgtaaagagggcaagggtagcttaatgaactgagagatctagagagaattattctcttagagttcaggtgtgtgctttctcagtataaagagtgtagacgctggagagatggctcagaagttaagaacatgtaatgctcttgcaaataacccaggttaggttcccagtgctggcatcaggtagtttagactcaactactcaggtagttgctgaactccattggcacctacactcacctacacacacacacacacacacacacacacacacacacacacacacacacacacacagagtacatgcatatgtttatgcacatgcatgtgtatgtgcatgcactcccataattaatgaaaatcttttaaaaaccttactacttgtatgtactagaatgtgtagttcttattcctagacatcttcaagctgagctatgggtacataatggggtcctctgtttcaggcaggtgaaacaataagttcctatatactttctgtatctacaactacataattattgactcctgttaatctgatggtgtggggggtagttctggacctgacttctcttcttcaccatcttcggtagcctggacaggatcacctgatcttttcaacagtgaagatactgatagacttgtctgtaaccttctttggatagaatcctggtttcttcttgtaattgtgatcagctgatcatcttaaaccttaggttttctggtggacttatttcacttataaagtggaaatggcatcgtcatctggctgaaagatttttaatgtccaaagcctggtactggttgcatagaaagtcatctgtgaacacacccattctatgttcttcacaacacatgaagctgaaacagaagtacatttgcatagtacacaggaagagatggttcagtactggggtaagagaagaagcagcagaacactatttaggtaactaccacctgtgtgtcatgggcaggttatattttatgaaaaccagagccttggtatccatataatgagagaaattttttctcattgcatggatcattgtaggggagaaaaattnnnnnnnnnnnnnnnnnnnnagtgatttaattctgattatagcttaaacagccaaaataagagatattcaaatgtcttacagtttggttataaaataccccactccaagactcatctttagaaaacttgttccaaaattggtggcactatttagagaggccatgctgttcatagggagtgtgcttagcagacagaactgggttggcctttgaaggttataccctgcccctgttcctactattttgtttgcttcctggtccactatactatgaacaacctctactatcaactcatgcttttaggaactaaactgaggtgctgtgctctgccttcctcaccatgatggactgcaaccctctgacttatgagtcaaaatatacccttccttcttcaggtattctgtcaggtgtcatggtcacaactgtgcaaaagtgtagtagttcaagagtggggagatcacaagaagagatggtatagaatcctaagacagctccaatcctcagatatgtaaagactaccacactgaggaggaggaagattcaagagtgcctatattatgtatatatgccctttaggacttgaattctcaaaacaaagtagcttcatttatgttctgaacaccttacagtatggtgaaatagaacctccctctgataatctaataaagatatagaaattctgcaatagaaaggcatcccaaaggtgccaaggagggccctccatgatgtagctgtagaatttgctgttagtgcacacattaagattttatccaggccagaacactcatctctgtcatgatagctgcaacctcatatttgcctcttgatatgagttgaatggtgttcccttcaaagtcttattcttcctagaaactcagattctaatatatttagaaatagattgttctcagttatgatttatgtgaaaatgagtccatactggagaagagagagtagcctatgctggttgacttttgtcaacttaacacagcatagatatatctgggagggggaatcttacttgaaaaaatagctctctaagttgggtctttagccaagtctgtaggggattattttgattgatgtttgagagcccacgaggaacaagccgatacatagtattcctgcatgaattccacactagttcttgcctctaggttcctgccttgcgttccttccttgacttcccctttcagtggactataagcaaaataaactctttttttcttcaagatgcttttggtcatggtgttttatcacagcaatagagaccctagctatgatggacattgatctaatataaactaagatttcatacaaagagggaaattcaagtaaaaattccagccacataagaatagcatataaaggcagggcagagggaggcaagactcatgcacaaagcatagaagctcagggacggttgacatgacatgaaagacttggagaggtgagcaaggagtctttcctagagcctctcaagggaaaatggttctgttgacaacttgatgacacatgtctagctgtgggaactgcaggttgataaatgacagttattttcagctgcctactttgtgccctattgtttcagaaggtcctagcagattaatatttcttgtcccaagataagtacctttagttacatgggagctacactgctggggaatcgagggagactgactaattaatactgtgtaattttggtgcctctgcctaaaactggtatagttcatgttcagagatcctgtaagattaggctgaagctagtctgcaatcaaaaaatcacatccttatttagcaccatgatttcctgtatcctgcatcctgagaattcatctctaatcttttgcttcttcagaaaccttctctcaggctctgcctctccacctgggctaaggtagcagaactcacagagaacaaagtgtaaggatgagagcatccaggagggcactccacaggagagttaaaatttcaaggacaaggaaaagtgagttagctggagaaaagtaagagggatctagcagagagaggaggacatgcaaaaagatgtctcctgccatttctgtatcaacagtgtgtaaagagggcaagggtagcttaatgaaccgagagatctagagagaattatcctcttagagttcaggtgtgtgctttctcagtataaagactgtagaggctggagagatggctcagaagttaagaacatgtaatgctcttgcaaataacccaggttaggttcccagcgctagcatcaggtagtttagactcaaactactcaggtagttgctgaactccatcggcacctacactcacctacacacacatacacacacacacacacggtacatacaaatgtttatgcacatgcatgtgtatgtgcatgtactcccataattaatgaaaataaatcttttaaaaaccttagtacttttacgttccctagaatgtgtacttcttattcctagacatcttcaagctgagctatgggtacataatggggtcctctgtttcaggcaggtgaaacaataagttcctatatactttctgtatctacaactacataattattgactcctgttaatctgatggtgtggggggtagttctggacctgacttctcttcttcaccatcttctgtagtctggacaggatcacctaatccttttcaacagtgaagatactgatagacttgtctgtaaccttctttggatagaatcctggtttcttcttgtaattgtgatcagctgatcatcttaaaccttaggttttctgctggacttatttcacttataaagtggaaatggcatcgtcatctggctgaaagatttttaatgtccagagcctggtactggttgcatagaaagtcatctgtgaacacacccattctatgnnnnnnnnnnnnnnnnnnnnactttttagtttttttttttattataagcattatttgaaagtcaaatctcaactcacagtggaagcctttggataggatcggaagtagccatatctctcaatgagactgagatattggtgtgaaatctacaagacaaatgatgcagccatgcctcttgattcctggtacctggatgtctgggcagatggcaggagatgaaccccgctaaaggacacactgtgtgtgaaaacatgagatacagaaaactgtgcttttctttgttcatgaagttattgtttttaacagctgagtagtactccattgtgtaaatgtaccacattttctgtatccattcttctgttaagggacatctgggttgtttctagcttctggctattattattattttttaaaactgtgcttatttaaacttgcatctttacagtatccaagcccatgcaggtttattagaaaatatctgcccaagagaagggatgggggaacagggaatggggaaaatacctatttcctaacagctatataaagagaacattgagcaccgacattttggtgtcagtagtttgttttgtttttgtgttttctccagagagtctcgcttctatcgacaagtatgtcttagaactcatcatgtctaactttcctgtcaatgccttcccagaactgcacatcgaaggaagcatgctctttcatgcccagctctctggcgttttaataggcttaagtagctgggacttggttttcttgtctgaattagttaaacatatacctctagatgtctgagagagacttttcccaaagcatttggggtgtttaatgaaagggctaacattttttcacaaaatggcttattagaagcaccagataaataggcctctcctggaactgtgggctctgtttggtctagtctttcttagagtagttttctttctttgtaaaagtaagtttttgagaatttcatacaatatattttatcatattcacccctaactgctccccctaatgtctcccaggcccatccctacctccctaccccataatttcattttctcttcccctctcccttttaaaatattccatcaattctagtaggcgctgcccatacacgatgagtatggagtcatacaatggagggtgctgaccatacacataaagaaaactggcatgctcccagacactaccagctggtcctagcttctccatcagggctgtggattgatgaactcctttttattctgtgctaggatgctgattagcttgatcttgtccagacagccattgctgctgtgggttcatgagtgctggggtcctatctggtctagaacacgctgtttgcctcttatctcttacccctgcttctcttctgtgctggtccctgagcattaaggagggaatgtagaatttagtattctgttctagactcttctcctagagagaaagatcttgtaacagctagtcctctcctggggactggctactggcgtattcaaatgccacatcccagaaactatgatactgatcatctgaaggcaacattgatcatcccaagatgcactggtgtaaactgtcaagttgtttttctttaaggaacacagtgggtggttcttttcctatgtatgagagtgctcttctgttggatgtgcaaaaagaacctcttttctggctgaaattctgggcacatttctgaggagtactctattctgctctgtgttggtaatgctatccttgtattaaagcttgggagtgaagccacttaggcaggtgcctcggtcccaatctcagttctttgaatgactaattatttgacattcatcttgatatctcttcttcttttcagaaaaagaaagaaagaaagaaaaaacagagtggatgttcccagttgttacccatagagttgctatgatactaaaaccaaatagtacacttttagtgtccctagtacactggcaggtatctacgactgtccagtctgtacacctcctactgctagcatgagttatttttaccattttgataaaatcatcatttcaaattgaacagacacagtgtggtgattgccatttaaaaaaaaaaagtttttctgttttgttttcagtgaatagctatgctttcccccactagatccttgggatttttccttaggtatatattttcaggacacacctctgtgatcctaagctcaaaaccttatggttggctctgtctggatccctctgtgttcttcacagtatgaaaactggagactttgtttaaagttttcttcatctgtgtttgtgaatacggtttcgttccagtttttaaatgtattcttctctcatgtattacatccagaccacactttcccctccctccactccacccagcaccctccagcctggtctcctctctcccccagctccattcctcttctgtttcccttcagaaaagggaaggcctcccagtgatagcaacaggacctggcatagcaaattatcaaacaactaggcccaaaccgccatatcaaatttgtttgtttgttcctttgttcctctccaaattctgttatgcctttgatagatacccacacatggctctctgcaatgcccctcccgatgtctgcgccttcatgtcactatactgaccttttctttaatgagaatttattaactactttcttacccacttaaacaagatcctaaacatttaagtcttcacttttaaacatgttgtagacaggtttttcactaggtaattcacaccagcctagaacccactatcctcctgcctcagccttctgagtactgatatgtgtgttttgccacaacccagctaagacagcaagtacttattcaactgtgaccctgtgctgatttgattggatcaatgctcacagtattagtaaagcacacctcaggatgcatttgtatggcttttccacatttccagggaggtttaactacagagggagccccacactgaaagtgagtggacatcatctgtattgggtagagacccacatgtgaaaacaagacaaagagaggtagtaatattctctctctctctctgtctctctctctctcctgtctcttacctgctcccatattctctctctctttccttgccctgtcttcctcctgcccccatattaccttctagttattaatatgataggagtacatctgctcccccatggcctccctgccatgatataatatccataatcttgatctaaaataaatctctccccttgagttcttttgctcattgttttatcttcatgtcaaaagttcaagacaagggacaaagagtaattccagtatcacctgttggtgtgttgtaagtcatctgactgtcctcagagactgcatggaccccagtcatggtgggcatgagaactcaggcccactgttggctctgaaaggcagggaagatcagtgaaggcccgtggaatccctgtggtcttacctggaaattttcaatatttctgcaatttaagtcataatgcaattttccattcttgaggtgagaaaatcaaaccccacagagatcagatgaactgtttagagtcgtgcacatggctagtgaatgcagggcaataaagacttggactctgactgcaggctagctccccttgggactctggctgctagctaactccccttcatcttttggtccttattgtactattttatgcagcagatttgcctaagcatgggtttaattactagagtgactttgagcacctttgcagatgggtcagtggtctatgcaataaaagttgtattttagcaaatttgaaaaacagagaggatacatggctcagttaagggtaagaggaaagacaactttgctgaagtgaatagaatatataaaggtatgaaagggatgatagtacagcaaattgtctccctaggtacatatgtatacgtgctgttaaacctataaagtggtacccctaagaccatatgaccagtaaattgaagttaaatgagagctctgatagaataaagaaggcaatggcatgtgctggaggccatgctatccctacctgaaccatatcacggatgcctgcacttcttagtgacatccagttttcttcagaacacttgatttttgtccaaagcagacaatgcatatacacagcaatccatcttcagctatttgaagcacttttgctctccgtaggaatttctgggagtcaaactgttacaagtgctcacagcagggaaaagaaaggcagaattggtctgaagattgctgcctgaggatgaggctgaattacattaagggggtcacagcaccatctacacactgaaggagagctttggcatctcgagggcagctgtagcccagggtttgcgggtggttcacacatctttttcctctgtatgctttgatgtctaaaccagaggggaccaatgccattttccaagtcaggctgtagctccctaacagcaggcttttctcccccttgatgtggtttcaaactttgtgggcagagatgccatcatgtgtcaatcacttgtctttgcatagaggatgctggggatcagagaggggttgattgtgttatacacgggagagctccttggatgggagctcactgggtctgagcagctgagcactagggaatgctttaaagagtcaggatcggatggtaaggacagaattgcttcgagataaatgacacaggattggaagctcacctctttttaatagaaatttcttatttttaattatgtatgcgtgcacgcacctatgtgtgtttatgtgcacatgagttcagatgcctttagaacccagagttgccagatccctggagctgaagttaaaagtgattgtaagctccccaacacgagcgctgggcattgaattcaggttctctgaaagagcagtatgtattcttaagtcctgtgcctcatctcctataaacctcttgggattccttccaaataaatttagcaacgtgtccctctgtaaacattctttctcctttattgacccaggaatagcaatatttttgtttgtttttcgtgatttataaatatattcatctctctgtgtgtttacatatgtggaattcagaagacaacttgaggcatctgtttccccctccaccttgttgagtcaggctctcttttgctgctgcattgctgaactacatcctccaggctggcccaagagcattcaagcgattttcctgtgtctgtctcccatcttgctacaggagttcagggattacaaaactgggacgtggtgtttgacattataacatgaattctgtagatcgaacctaagtcaacaggccttcactggatgagtcatcatgtcagcccagttttttgtagtgcttaaagaggccatttccctacacagagatggctgtattttaaagtctgttttgatgagtgttactgtgctcgttagcagtttgtcaacttgacacaagttagggtcatctgggaagagagatcctcaactgagaccatgcctccatcagattggtctgtgggcatgcctctggggcatgctcttggctaacgactggtgtgggagggcctagcccactgtgggtggtaccatttctgtacagatggtcctggcttctataaaaagaacagacagagtgagcctctgggagcaagccaggaagcagcttcccttcatggttccttcccagagcttttgctttgatgccctcagtgatggtctggaactttcaaggtgaaataatttttttttcttccccaaatttctttcagttatagtctttatcacagcaatagaaagcaaactaggacagttatgtaaccatattcaaggcacagaaaatttccaaactccagaagttttccttatggccccttccagtcagtcagcccacttgagggaataatattctcattttcatcatttaattgtctgaatcaacacatagaatactccaacatctcagcaatatttgtagaatgagggcttgaaatacacagctttagttgttgactggactagccttggtgacttgtacctaagcaataccgattttggggactcccaggaatgtctgactgtaatggttcctctcccttaaactttccctggaagacattatctgatcaataggctgcccttcacaggctgtcccctgcagtatggcccacaccactgttggtcattgctgcttttctcagctatgatactctccaattccatggcacaatgtctatgtttatctccactgctggattccatgttcaggctgcttcagctagcagtgagatgcacacacaggtctgtagaagttgggatttctctcatagggaacttctacctgccaagttgttcatcttgagaccttagtggagtccttggtggaagagaggtggatttgaaaacattttttttcttttttagtgatggggtctcatgcatctcaaattggtcttgaactcactatgtatctaaagatgacattaaacttctggccttttgcctctacctcttgattatgtaggtatggtctattatatccagtatataatagaatgttggggcttaaagtctgagctctgtgttagataaacatttaacaactgagctaacatctctagccctggaagcatgcatttgtagaagtctacatcctgtgtcatggatcaacctcatgtctttgtgctttagatgtggttgtgttggctgcgtcattttcatgggacctggacatttactcatcgctgtcgatggaaagctttgcacactttgtttctacccaaaggttggacacctggggaactagaaatggtaaaatgtaatcctgcttctggtgatgttcccagaccctgtccctgtgacattgggtagtctggagtgtcatcgaagtgtaagatatgggcatgtggttggcgagtagattctctgatatttcctgtgttcgatgcatagacttgacttatacttgggtttcagaagttgttttatttttttgttgttgttgttttgtttgttttcatttatttttgtagctgtggcaaaatacttgacaaaacaactgaggagtggcaaggtttattttgccttttgtttaggagcttgctgtcaatcagaacaggaaagaaatggtggtggagcatgaggcagcgggtcacattgcgtctgtcctcaggcagtagaggcagatgaattcttctgctgtctaactgctttcctctccctacccttcttaataagccccaggaccccagaccatggaattatgtcagtcacattcagggtaggtcttccctcagccaaacctctctagaaaccttcagctagatatgcccagaagtatgtcttgtctcctgtgtgattctaaatccacttaagttgctgaggaagattaactataaaagaaggattcacaaatttctgaaataatgcatagaactctgggcagtgtacttttccacatttctctgaagaatacctagtttcttgttggagttttagggtctctgtattattcaaaattaaacacccctggtatactcatttttaatgacacttctgcttaattccataaatatctaaaatataaaaatgagaaaggaaggggtaagaatctggagccgagttctaatgctccatctgccccatttcttttaaatatatctctatgccccttgagactcattattcctctggatgtctctgagatcttaggatggctacatctaagctggactggatgtccgtgttcatctcttgcatggtcttactggagagttcatcttagatatagaagaaactcctgataagaatcaatgcaaatatttttattcatttaaaatgacatattgcttgttaacaagaaagtctgatctctcatccctgcctctttctccctttaacacttgcatacatgcctctgttttaaaccagcatatcacaaaaggggggggggaatcaaaatgtaaaaactgaaagcaattctctaatgctataagagacttaaacatcaggaaacaccatgctgaattttcctgatctactttggaggagaaagagagatgcaggtatgccacaatgtctaggctgcacatgaacttgtaaacctgcccttggagatggggacatttatacactcaagaagatgtttgttattgtacttccacctaccattagaaatacataaaaagagagtaaatgtttggaaagattaatactgtattttctttctggtggtcagaaattgaaaactgctaatgcctgaaacaggaaggcagtagagcatgggagaaagtcgatgggagagcttaatgcagccaccactcagcccccacagcgtcagagtgggttgatcttcgtcctgtccagagccggtctgtgaataatgatattaaggaattaggcagagtcatcacagagctacagaatatcacccttgaggcctcactggagactgatgggagctcctgggggttgataatggcagtcggaggctctatatatttaaaatgcacaaaggatgagcccagaaattatctgcctgccaacttaacttctctacctggaacaaattatcctaaaatcaatttgcaaacacctttgagataacaaggtcttgagtaataacctccttggctttgtaaagaaaagcacctagcttgactaatctgcttaattcctttctctgaccaaatggcgagcaataatagaggcaatctgaagttgtccctccagatgagcttagagtcacactgagactgtattgtccatccctgtttcagagtagatgattctgcttctggaggaccttttagtgctaggtaattaattaaaagaaaaaaaaacacacagaatgagccctcctctattccaaagtctccacctgagtcccaaattaaactcagacctccatttattcacctaggaacccagaggctctccatggtaaagagtgcttaaataaatctgcatctgacttctcaccctatcacctcagctttctgctggaggattcaaggacttattcattcctcttggcagataaccccattcctggcctttggtcatgtaacactaccaaagccagacaggaaggcctgaaataatttgcatagagatgtcagtggcagaattatttaccatattagagcttagaacagcccaagtgtccagcaatgggagagtaattaggatgataccttggtcattattcagtacctagaaaagacagtaaaccccttgtatcccataaccaaaactatgcttaacgtgaggggtggggcagaacacttctatatctggcccgtgtgtcactgaaaccagaggaaatgatgtaagtccatgaatgagaactgggttggcatctgcagaaatgtccaaggctgtcacttcggctcctaaggaagtatgtgctttctctttcattccttctgtgacttttgttccacttctgtgtttgtcacagataaaaaatgatgaacagaccaagtttgttttaaaaaacaaacaaacaaacaaacaaacacaaaaatgaacaaacaaaatggggatggaggtgctggagagatttcagtggttaggaggatttcttgttcttgtggaaagcaagtgtttggctctcagtgcccatatcaaatacctcactgctctctgtagctccaatattctctgctggactttggcaggaacctgcatacacatgtaaatatttacacccttatgcacaatcaaaacctaaatcctttggattgtctcagagtccacatccctgaaaagaagtgactctcactctccctgtggatatcatgctcctcagagaggggtggtatgttcccgatccatgatgggtctctggttgatcttggggaagtcctgtagaaatactatgcatgtgtgaataataagtataatatttaaatttaaaagatttgttcattttattttatgtgtatgaatgtctagcctgagtgtgtgtttgtgtaccacttgtatgcctagtgtccatggaagttaagcaaaggtgtcagagccctggaactggagttacagatggcaataagccaccatgagggggctgggtctgggtcctcttcaagagcaaacaagtgctgctagccactaagttatctaaataaaatagttttcagaaaataaaatattttcagaaacaaatggccactagggaaagtatggtgaggcatactggtaatccctaaatttggacagacaaggcaagagaatctggcatttgaggccagcctgagatacatagtgagcctaaggccaacttggccaacatatgaagaccctgcatgggggttgtggatttcattctacttcactatgctgtgagcttagctaggtctgtttggttaagtatatattgcctaaggaaggtgccacacagaccagttatctggtaacttggcataacctttcctttggctcttgattcttgccgggttcctgttggccaaggacactctctgctggtaggaacctatcaaggtgagggagaagctgaatttttgttgccttatcctttttcctatctgtgtttatatcatcatctgcagaggatttctacaaatagtgtgttggagctgcaggggaactagccagaaacctcctctctgtgaatgacttctgagctgccagaggttcaccctgcacgatgcaccagtagaaaagcaattggctgtttcacccagctacctaccatgacaattaccagcatggcaagatgtggggcaatagtgtcaatgaaagcttaggcttaactatcaactgactgattggactaaggctccttaatagaaggaaatttaatggctggtattgtaaaactattcagctacccatggctggtgagattacggactccagaggagaatctactacaactgcatttctagcccactatatatagatagcttaactatcttctacctacttagctttatgctctcagacataccttacacattgctcttacaccttatcaaagagaattctttttggagtagatggagctgatcagttactcttgctatgatgaaacaccatgatcaaagcaacctatggagaaaagggcttatttggcttacacttccacattgtagttcatcactgaagaaagtcaggacaggaactcaaacaaggcaggaacctggaggcaggagctgatgcagagaccacagacacatgctgcttagtggcttgctctcatggcctgctcagtctgctttcttttaaaatccaccacaagcctaggactggcccggcgccctttggactgagccttcccacagcaaacactaattaagtaaatgtcccacagacttgcctacagcctgattttttttaaattaggcattttcttcatttacatttcaaatgctatcccaaaagttccccatacacccccccccaactcccctacccacccactcccacttcttggccctggcgttcccctgtattggggcatataaagttttacagcctgatttttaaggaggcattttcttaattgaggattcctcctctctgatgactctcacttgtgtcaagtcaacgtaaagcaaatcagcatacccatgattggcaaaatccagaaagcaattcaatcctattggtatatctatctataatacaaatcctataactaaggctcagaatagaacttggaagaggaggtgaaaggctttaagagccacaggttgggggcatatgatgtgagatgatgtcttctatatgagacagctgtacccatgacatttcaatagcatggtccttagacaagaccaatataatgacaacaccagagtagatgggaaaaatcttacaaggctccactcctaaataaagagatacaagcaagcacttagtggttgctgagagagggagaatcagcccccgagaggggctcaaccagtcattcctaaacacatattcactcaagttaacacacacactcacacacatgcataagcatgcacacacacatgaatgtttcacataatacaagtggaggtcactgtcaactttctggagttggttctttctttctttctgtgctgtggatccatctcaagatgccacttaaggctgaaattcctttgcttgcctgctttctttcagagcctcccacgcccattgctcccccggaactactggccgtgggtgccacctacctgtggattaaaccaaatgccaactccattattggggatggccccatcatattgaaggaggtagaataccgcacaaccacaggaacctgggccgagacccacatcgtggactctcccaactacaagctctggcatctggaccctgatgtggagtatgagatccgggtgctgctcacacgaccaggagaagggggcacaggaccaccaggaccacccctaactaccaggaccaagtgtgccggtaaggatgctgttcttctgtctggccctcctcttgccttttgggcacaggtcattcctagtttctttggtgtgtatctgcttgcttccttttatggaaagacaattaagggtttgctcagacttgagagacactctcagttctggctgtgattctgtgagccttctgcctctggttggttaatggagatgctcatcatgttgaaagtatttctgatggaatattggctccatcatgttgaggaatcctggtgccatttgcatgtctttgagggggtcttagtttggtgtcaatgagggattttgcctctgactgtccagaaatccccatgtagactacatccctgcaggcttctggttccatttgtatatctaacatgtatggattgtttggctcaggaccaaacaaactggatctggtcattgctctggtggttcctggttctagttttgtctctgaggagatcctacttccagctatttctttacagctttctggctctgacagtgtctcagagctgattctgaaattgtcttggtccctgagaactacctaactccaaatactctaggggatgctggtttctgcttaagagtctgacttggtactaggggcctctagattctcctttacctgagggtttctggctccagttgtttcccagctgttcctggttaagagctgctggctgtgggtatgactagggtgtgtacacctgtatctatgaggccttttggctttgcctgttgactaagattggatctctgaatggaagttatgaaattaagggagtctgatgttcatttttctaaaactcacattatcttcttagcatcctcgaataccattccctgaaagtgcttttgttccatatatacacaaagggagagagacgctattttctaactttatacaaagctcgatgaattggccagtggtccagtcaggttctggacttgggttttgggttccagagctttggatcattccttactccatgatgagtagagaggtgtgtgctgctgataacccaagctcagggctgctgtactgagttgacaggggcttagtgaagcatgcagcacagacttctgagggaaaatgcgccaaagacgtttctgaggtagaagtgaagaatctgtaggtacagcaacgtggactacatctgagtatgttgcctctggcctgttataatttgacagctgtgtccctaaacttgttggcttttgatgtatcatacaataaagaccacagggcttaggaaagtaggggtagaggtaccccgtgtatccttagtaacacagacgcaggagagcacaattttagacatcaagtggatcagaacatgcaaaacactataatgcagatagccaacatctcaggaacagcttgttatttgcttttacacaagtggtagggtgttgcagcctgtgagtaactgggtagcaggaaaaggccatctgaaatagatggaaaggaacctccaggtacaaatggatgtgtcttacaatggtggtgaactgaggaattagtcaggtggtggtggcggaggcggtgggggtaggggtggtgtgtgtttctgtgtggcttaggtttttgacttcacttctgtctttggtaggcacagtcacagatgggcagatgtagcatgtgctctgtgcttacattgctccctcatcgatcaattgtttaggagcaaacttgagtttccagttgtttgtgaaccgatatgagtggctgagttgacagtggccaatcttaggcgtctcaggagtgcagccgatagtgtgaaagccaaggagcttcaacatctcatggctcagacttactccttggaaagctattgaacaactatgatgaacagagagtccattttcccaacgatttctctaaactggtctttggtaaaattccacattgaaacctgattatgaagctgactgctttcagaggacataagggtacattattaagctgggtaattccttaactcagctctgcactgtaatagtcatccataaaaataattgatttgaacctgttgacaagacttcccctttttccacaaggtaaatggaaggctttggagggggttctgatctttagaaatgatattccaagcactttcaaagcccctgtgggcttatttgctcatgatcatataatgcagttagaaattcaatcgcgagatgatcatctcaataaaaatttataacctattgcaaacagttgccacgactgtagaaaggactttacatgtgacagacacagtggtctgactaccactataaaaattatgagttgaaatgttgtttgtggtattgtatttccagaaatgttggtgtttaagtaagttaggcttaaagctcaaatagcctacattttacaaaatgtgtcataaagaaaataatctttttttcccatcaccactgatggtagaatgttctttgcttcataattaatttttcagagaatccagggctgatatccatttgtagatgctctttattaccgttggtattgggagttttctcccctctccctattctattattaatcacactggaaatgtactcattattttgcaaaacagaaaatgagggtgtgcagagtgtggaaagtataatttctgcccagaggaatttacagacttggtagatattctagacattttttttttttaaaaatgggtaagatataaaaatgaagtttgagtgttaaaatagtgtgctttgtgagaatggggtgagcaatgtccatagaggcatctggagcagtgtgtctcagtgtggggttcctggaccagtagcatcagtgttgctagagactggacacttttgttacctcagttcttaagttgaaaaccctaggtctccctaggatggggtaggacatggtgcctttggagtgacttggttataggtagatttggaccatgtgaaagaggccccaacattcatgctcattcaccatgtgcgggcacaatgagaagactgggctgtgagccaacagtcaggcctttcccagccctgtacaaacaaaggttctgttgtttataaataacctattctataatattgtgtcacagtaacccaaaaagattaagttcttaattagttaagaattaagtagatccagtcctaatctctctgtacccaatgaatcggaaagtataagagtgagggctggcaatcagaagccctaactcacacagggtcacatgcaaactgtggtgcattggcttgccctctgggggcagagccactgactgtgtgacttcatctttaagtcagctctgaggtagacaaggggaatactgagactcagataattggctcaaggctacacagtgtgtaagtgcttaaagccaagtctcttgactctaaggatctccccgcaactgatgatagagtctctagccctgggttgggggtggttcctctgctcacaagtgtcctctcaagtatggggttgggtagtaactatggagacaagctaaaaatgaatggctgtgtttgtcctttataccaaacagttactcattctcttctgtgagccaaactttgctctaggcagtggtagaagaggccggcttggaaaggacaggacaggacaggcaggggagaagcttggccatgggtaggtataactaagcttcaaaaagatatcagggcaaccaagtctgtgagggcaagtaagggtatattcttgttctattgtgtataacaagtcacaacctgattgatccttggcattataaggctgagacttacacttgagggtggaacatttaggagtttatctgaagagtgccccagaccaatgagtcaggagctcagagcacacttttagctaattataccatagacagattcacaaggaattataaatgtggggatgggagaaggggatctaaggtgaaacctccagcttgtggtataggcgactgagacacgagaggagaactgtattctgagatgggaagtactgaagatggctataggagtgagtaggatgtggttaggtgaagatgaatagcagccaatggggatatattcatctggagcttaagaaaactgagctctgtccatgaggactcccccaacttcacctggacattaaggtaggggcctccttagcactgatgaaatcagttttttaactctctccatcttcatgctgtccccttaagatgcttcattcattttttaattcatcattttgttcctttatctcattttaatcattcatcatcctcctgagataaaggcctaggggcaaagacaatgatgtatagcaaagtgtttttgaaaagctcaaaatacgcttttagacgcctgtaatgaaaccaatcactatctgttgatggtgttatgcatggtattattgtgagctgttacatacagacaagaaggctggcctgtttatttttagcatgagcacccattgagattgtgggtcatgtactcttgttctttgtcctctcatagggagtaccatttctgaccatgatgctcacagtgcagtctacattatgggtagccttcttatctagagcattgggtgttttcctctagcatatttcacacagcaggcatctaggcagggatgggaggttagggatgctggacaatagatagctcactttaaaccttgactctaaagggaaggctacactatcctcacagaccatttccccggtgaagcaactgagctattactattttctctacgtactcagtgataacttaattgccacacaattcatcttgggggtcacaccctttaggctccaagtacaggcagttagccattgtggggcatatctgtaactccagcatgctggagattgtggaaaggaagttgtgagttgaaggccagcctgagctacgtagcaatatcttatatcgaaaaaataaaaagtatgactaggaggcagactcttgcatgaatcatttggagtttttaaagaaccctgaagacaatggcactgagaaatgttacccaggtcattaattgggaaaaacaagaggtaccatatggactcaacctggcttggcagctcttctgtaggtatcagttttaacagcctcaccgccagcatgctggtttcctgaaagaatcatctagcaccacacagaaaagactccaccacatgtcactcaagatccacttccccacaacagccacatgtaggccttggttttgctgtctgccagcatttctcattatctcaaaatcagggtgttgggacctagagttgtgtctcttctcctcttgaaatctctccccttccttctcaaatcccagctgaagccagaccccaagcaactctcttcacactcctgttataggttcaccaatccgttcagtaagctgaatgattgtcccgccctaacgtgattgctggttcctgtaaatcaaagacccacttgcctgagagcccacttcactgtagtccagcaaagttccaattccccaagtggaaactcactccacccacgtggttggaattgcctgctctgcagctgatttgaagggctctctttctgttcccttcacctgagggctgattgcacgctatattttatttacatatttatgggtttctacttgaaatgatatgtgtctagttctctcttttctccagagggataaaatggaggaattcaaattgctgagctcaatgaagtgagagtcatcattagaatttagtgaaaaggatatgggccttagagccaaagagaatctggtttgtatttcaagcgggacatttgctagctggatgaccagggatgtattacctcacctctccatgcctccacttcctttcttccattaaaagaagattatatcacatcaccccacacccagagcttcagtaaggcctgtgcctagcagagacactaatagagcctttgataaacataaattagaatggaatctcagacctggaaagagggtttttaaacgtggactaattttgttccttgagcatgatagatcctatcataagagcatttctgtagtactgtgcttaacatagagaatttgatgtctttgggaagatgggatgcttgtagctgtgcagttatctgtggtcctctttgagtagctatgatggtacctgatggtggggatagagtgcagaggatgggaattggtcttactctgggttctgtccagaagcccaggcaaggtagacacacatgccatttagatccctttcttttctagaaggtcaaggaacataagaacaaggccttgccagttcagaaagaaagggtcagggagagtcctgaaaccctaaagatagcatcttcaggggtctcttttctcaaagaggacactagggtcagtgtagaaaggtctttcattctagagaacaattctgcatcagagcagagtgagaaaggcaaaaaaatacttaagtgtcttcaaaaataggacaagttcatttcactatgccctgggaccttttcttttttcttttcttttctttttttcattgctataagctttgctgaaccatctgtaatgtgatggtgtgtatttgtcagggagcagatgtggcataatttggctcagggcattgaaccaccttctgagtgaatgttataatgaatacattctcttcctcactgtggtcctgctctatagtcaggtgaaatcatccataaatcttaagggaacatggcaaggttagccaatgaaaaaaatcaaatcctcatcccatccaaaatgaaataatagaatcaacagactttaaagatcagtgacaaaaacttcagacatgccacagcatgctcaaagggacattgctgctgatacaatgcaaactcagactggagacaactgcataacatatattatgaccaccgtttcctcagaaagaggaaaggattggttatgtcatctctttgttttgtctagtgttcctatactgccctcttcgcttgtggtataaccatgccctgctatttcatcatttctagagcctccatgagaaccaaaggtgtcttctctggggtccaagaggtctatcttctcttcttgcagactcctctcctcttctatcacatgttgccttggagccttccttccttggtttatgaaagaggtggctgtaaggttaaagccctttctcttaaaacccacacttcataatctcagatactttcttccccctactccctcttcatattgtataaagagagtatggtgttgggagggtgtggtgagggtccaactgggtacctctttgcgacttctggaaaggatggctggtggtaccttgctcttctctgtagaatgtcatctttttaaatctgctccttagtggtcataaagcaaattccagggcaacaacaacaagagcatcattctgcattctcccacacttacatactcctgccagcctgtcctctctaggggcttggggcttcctagaagctgaagcacaaggagaagttgaccaattctaccccaatctctctcaatcctaaaggttcagatctgaggaaaaactgagccacacagacacacacagacagacacacatatgcacacagacacagacacacatacacacacacacacacacacacacacacacacacacacacacacacacaatggtaatgagagctgtggtcctgtgagtatgcctgtcccatgggaagtgacactattaggaggtttggccttgttggaataagtgtgaccttgttggaggaagtgtgtcacgatgtaagtgggctttgaaggctcctagtactcaagagagtcttctcctggctacatatggatcaagatgtaaaactctcagcttcttctccatcagcatgtctgcatggaagctgccatgcttcccaccatgatgacagtggactgaacctcagaaactgtaagccagcctcaactaaatgtttgcctttatatgagttgccttggtcatggtgtctcttcacagcagtaaaaccttaattaagacaagagctaatgctatttatgtatcaagataattcagtaaaaacagcccctatctatattaaagttggggtcaattactcctgaagctctaaaagcttaaggtaataaatacagcagatggatggttgttctaaagcaaacagtggctgtcatcatgaatatctgacacctgtagcttgtatagcatgaggttggcagtgggtagcttgaaattcttgccacagccttcagggcaggtataatttcttccagtggctatgagacagataacatgaccacggtcacaatctgcccaagtggcagagccaggaattgagcctttaatatgtagctatgtcttgacttccttcctgctgttgtagtcaaacacctagcaaaccctgcaggaggggccagtatgagccccttgctgccaactctttacacctatgttcattccccggggctcaaatggtggaaggtgagaatagcaattgccacaagttgccctctggcctgtggattgtgtgaacacacagaaaataaattagaaaaattaaaacaacaacttttaaaaaacaacctaagcaaaggaaggcttggcttggcttatggttcaaagacacagtccatcatggaggggaggttaaggcagcaggagcctgaagcaacttcttccatcacactggtagtcacaggtgggggtggggaaaaattgctactcaatcccctttgatttgctacagtcaaggattcccataaccgcaatggacctgattaatatggtttttacacatcagttatcaaagaggatatccacatcctcatctcccaagtgattctagatcctgtcaaattaacaacaaaactaagaccaggagctaccaagctgtctaatgttagcctcagaattcagtgtggttatcaaagcatcatataccatgaccaagtggggcttctctcagaatatggtgagatatcagaaaaactactggtatgatatttctttctagtggtcagaggataaaaccatatgatcctctcaggagaggctggaaagtaatttgaaagaaattcacccttcattactgatcagaatccttagtgagccagcaatgggaaggcgctttcttatttcaagcggaaaatgttcttatagtctcaaagcccaagagactaaagcaaactttgaaaaaaaaaaagggagaaaaaaactagtagaaatactaatgtatttcggtcttgtagttggaccaagcaaataaataaaaatcaatagttacatgccagtagtaagtgatacaaaaataaaatgaaatatatcatattcccaaacacaattaaaatataaatgcttatgaataaagtaagaaaggctcagaatctgtatgaaaatacatacacctctgaaatgttattgaggacgattaaacaagactggaataaatggagccatatatcatgccactggattagcaaatttagtactgtgaagatatcactgttcccaaattaatttataggtttaatataatttgcaatcaaactcctaatgtgattctttgtggaacttaacaaagcaatttaaaaattgatcagaaataatagccagggggagtaatccagaccactttgaaaaaatggcaggaggaggagatttctctgagataaaaatatttataatcactataataattaaagccctccatagaatacaatctatggagagacagtgtttagagatttatctgattgtgtaagttcttaataaattgcacgtgcttaataaatagtatacaatataaataatttgggaaatggaatttttggtatatagcatgatatactaaataaattgcagatagattagacactcaaaagtatagataaaggtaataagtaagagaaaataaagaagggatgttcttttattaggcaggagtctcatttccttaaatgtaagcagaaacaccatcaagattgtgcttataaagttcactattcaggaaaaaatgaaggtcaagggatgtctgtggtggatactgacagtactcacaaatcaaatgggctaacaggctacaggaaaagctgcggcaaaatgagaaccaagggcaaatccccctgtagaaagtgctgtggtcactaaaatgtgatcatgttgatagataaacagctgaatggcacaaacagatccatgcaatgaaaatgtcaaaggggcaaggcttggcgatgagttagtaggtgaagtgtcactttgcaagaatgaggggtagattcccagaacccacgtaaagtcctagagtactgatgatgcccatctttaacaccagcactgtgtaaggtggagaaaggcgcactcctagagctcattagccagccagcttagctgaatcagttaccgtcaagttcagtgagtcactgtctcaaatattaaggtgaagagcaattgaggagtatgcctcatgtcaaccactgtcctacatacatgcacatgcacacacatctgcacacacacacacacacatctatatgcaccacacacatgcacatacacagataagaatgctgaaatacccaataaaatgtccagtgttgcagttaattaaatggtttcttttacctgtaatattacaagagtctatgttttgattaataataaccagcatggtgaagaaacaacaaagtgagctcttctttttaacattattttttcttcattaattaattagtttatgtattcactttacatccccatcacagatcccctccctcctctcctcttagtcacaccctcacaaaccccttcccttctagagccttcccttctcctcaggaaaggggaagttccctataggtatcaacccagcctggcagatcaaacaggaggttctgcaggtaggctgactggcactggtgctgaggagagttccctaatttttttcttaaaaaaaaaatcagaactctcagaaagagttctacatcaaggccattgctgcattatttataagggcaaaaacttgcaaatcatgtaacagaaacacaataggaaaatacttaaataatgtgtggaacatgcatacagtacaattttctgctaggttgtacaaaccacattcccaatgatagtattcaagccataagatgaacaattcagcttacaaaaatgctcttctgggagaccatggtttggttcctggcttctttatggtggttcacaactgtctataattctagtcacaggggatccaatgctggcctcttccagtaccaaatatgcacatggtacacagatacacacgtaggcaaatcacccttgcatgtgaaaataaatatgaatttaaaaactatatatgtaaacactgtcccaatgtggagtaatttatctgagagaattacgaagtatagaagatagccccactgtgtatcctgccagagataaccagactacagggctctccatcataccagcccaggagtttgaacctatccttttaactatagtttccaaaagaagaacaaaaagccacatctatgataaagatttttatatggttgattgactgattagaaacatctttgattatagcattggaaaattgcagaattagagccagtctatgttggacttcctctttatagccactcattacctatctcactgtctgcatcatccttgtgactcacatgagacccctagggatgtactaagagatcactagcttccaccagccacactcaaatagtgttatcagatagcaacccagtcctgtcttagagatttcccctccttgttataacctggctacctggtctccccacagttgaatttagagaatgtcttcattattttactttgtcttgttttgtaagtataatagcttcaagaagcagcttatatgttagaacacaatatttgagataaactttatctgtattctggagttctggtcattcatatttgacaccaagataaatgatctctttttccctttgaggtaaaggctgtgtttctacattgacagttttcccagatcttagcaggactaaccgaccatagatggggccattcctccactcacccagagctccatgaacacagtgtttcttcttcctcagtgcatgtcttggtgcttgatggaacaagcaagagtttgcttagcaaatgaatccaactattcctgaacctggaaagtcagcacacagagattagattttcatctcccatgttccctctcccacatcacaacacagatatcaaagttttttttttctcagtgccgattattgaacatatggatttgcatgtactaggcacatactcttcctctgaactagatttccatcccccttatgtattagttatctctaaaggaacagacccgatagaatgaatgcatacatattaaaaggatatttataagagcaactcgcaggctgaagcccaagcaatctaacagtggctgtctcctggtagacaggccaagaatacacgagttattctgtccatgaaagtggatgtttgagctgtcctgatttggtggtagagtccccagagaattcctacagagccactggccaatggtccctttggaatccttaagctataggttctaataccagcaaaggaatgcctcagccacaggagagatgacctggacagcagtagtggaggcaagcaggcaaaaagcaaaggcttctttttatccaggccccattatgtgagttctcatcagaggtgtggcccaggtgtaggtgggtcttctgacctcacatgatcaatatttgggatgtgtctccccaatttaggtgatccactcagggaacctctgaggtatgcccaggtatataggttttatttgattctagatgtagtcagtcaagttgacaattaagatgtcattataccttttgttgttgttttgttttttggctttttttgtttttgttttttgttgtgtgtgtgtgtgtgtgtgtgtgtgtgtgtgtgtgtgtgtttgagacagtatctcactacaaattaactctataacccaaactgattttatacttggcatcctcctgcctcagcatccccatcccaagcaatggagagttcaggcataatatgcctggtcagactgcagtcatgttgtgcttgatacaaagcaattgacttgctccatgctcaaggtccaatgttctgtgcatagctcttgcattgagttgaacaatgggttggcatagggtggctaattttgagatgaaaggtctaagttggtgaaaactccttaatatgttttcagtataactgtttacacaggcatgcttgcacgcatgcgcgagcacacacacacacacacacacacacacacacacacacactcagatattgaaattataggtcactataaatgttttatttttgattcactaaactgcataaaacttacacaattaaaagtaccttccccttagggtcaaatgtgtctataaaggaatggttataaaccgtaaaacactctgtacaaatgtgagaggcttatttctaattaaacttaacaaatcagtggtattgtgagaaagctacaggctagttcttcattgctaagtccctaagctgcaaatggagcaagagctggtccactgagggctttgttttcaaggttcatctgactttggacccagatccattcatttgcgtgctgggtgacctagcacaatttgctcgactgctctaaatcactttaccacttgttcaccaaagatactattgccacattggaaagtagtaagaggtattggaaagggctaagaatagacttgtgaacttacctccttgaacctgcttgtacccctgcaaggcatgaggtagatatgctgtcactgtcactaccaaggccagagagcttaagagatttcctctgagtcacacagcctgaagtctgagtgcagaagaccctgcttttagtctccctgacagtattactctgacattgagcatcagggcctgagtttagtaggagcttagcacaacaactctctgtgggcttgcagtgctttaaaaccctagagatagtcacttctatccacatcccctcaccagttagctcactgctgtgagccaagggacaaagggaagatgaaagatgactactacatccacaaaggaacctaccgtcacaggcagggggacatcagactagaaagaaaccccagatacgttattcagcatggcacattctgaaatgttaagtccctatcacacacagaaggatgggagagttgttcaaagtatgagtctggcttggtatggagagctcttccgtgggttccatttcgcaggcaccaagggtaacccatgtgtcattctgagtgtcaggaaggtgagtgtgccaggagctagcctgaggaagcatgtgcgagaaggtagtgggtctataaagcctgagggacaggacacccatcctttactgtcatgtagatgtcccctatgaaacacagcagtggcagcagagggtgagccttccagccagctgactaaggtccaagagcaaatacagccactctgggcttctcctttttacctcttgcccttgaaataacaaattatcaaattgttataagctgaaaacaactttatttttttagcgaactaaaatatatcccatattccaattagatgagtttttgcttgtgagcatcccttcatgtcactgacataaatctcatggcatcatggcctgtgtgccatatgtgatccctgcctgtcactcaacatcagaaaagtaaatattttataggtttttgtggaatttgcagcctgtttgaatggctctttggtgacccaggagtctaattaccccaatttgctaaatgattcctatgtagcttcatatttaggcatctccaaaaccttgctttactgccatcctatagccttctgcttgaacacttttccttaaacaaagtttcaaggaagatattataagacagagacatccttatggctcttgctgtacttcacagattgcttccaatgatatgagcagttcagtgtacgcttgccaggattgtgtactgtcaatttgtttaattttgcccatttcacaggcagaaaactgggatcccaagtttactccaatttacctttatgcctcagaactgagggcttgatgtgttctaccacagggcaagcattccaagtaactctcctgcatctctcctatgctttttattttgagacaaggtctcactaaattgcccaggctagctctgaactcacttcttagcctaggctgaccctggagaccctcctccctttactctccccttacctccagtctctttgtctacattcttcttcttcttcttcttcttcttcttcttcttcttcttcttcttcttcttcttcttcttcttcttgcttacatgtgccaactgcttccatctttttcctttccctcagaagtacagggtagaagagatcactatctttcgtatgtcagcttgtggtctaagcacttaaaacactgcccatctgctcatttgtgtgtcagcttgattatcatatgtcatttccattggatggtgcatctccaaggacagagctccctgctcttttctggctggaattgtatgtagacactcaacaaatgtgtgtcaaatgcatgaattttgtgaagaggtctgtgcatactgtaaccaaacttgtaaagacagaaaatacacagtcagaaatgaaaatgggcccatgtaatatcactcaatggaaatagatgttgccaaggtggcatttttttaatgggtcttgccattcactgaacttattagtgcatgtgggttcactttggtctttggtgtgtggtgaggtctctactttgcttctcaagtatttgacaagttatccccgtgccaatgggaagagatggtaagacagtcccatagaagacagataagatggaacactggaatggaaggagccattattgtaaagccagaggttttgcaaacacagaaccaacacagtaggagcttgctttaggaggagaggacagccgtgtccatgtgtggcagcactgtgagtgcagagcattggcctttctaactttccattgctctttctgaaccagatctcatgaccttcacagtaagctgagattaactcagtgatccctcctgatgtatacaggggtgatcctgagggtaaaaaagatttagtaatagtcttattattccaactggaatttcatgatggttatgaaacagccccttctagatctacattctccttcctctgccctccacctactacagaggtttctgtagcctctgaatcatggaattaaccagatattggggcaggggtggaaaccatgggttaaaggaagcaggaattctgattaattgaaacttctttttatttgaaggttaagcagcagatgcatttaaacttgaccctgaccattttatatgggataatatatgaactaaagacaataaaactgagcccagaggactagctctgagaaggaagaagtcaacaatatgactctcaaattgcctcttacagttggtatgcatgtttgacggctcccatacccactgaaagaatttgatcaaggccttgtgtcttagacattcaaagacactagacacttcatggatattaaaaagccagtgttctgtcttgaacacactaaatgctatgtgtgctaaagatggacctcagtttcttactgcacatctggtagatttcagactagatatatatacatcctcagttaggcatcattatcaagctgttctgtattgtgaggagttgggggttctaaaagagtgagcaatgggacccttgtaatatgtcatgcaaaataccctaagaatatagcacttgattctggccatatattgtcaaggacataggataagagattttacgtggaatagtaatgggccctgtggggctgggctgtgaagtctggatggcagcctggggtgctgactatgatgttttcttgcaagctagagagcctctagcgctcagagctgttcagacatctgctgcacagagcagaaaagcaaaggaaggtgtttacatcttcctggcgtggtggtggtgatgaaagaaatatgtcttcatttttatcttggaagacacagaaaaaaaaaactaaagtagaattcaaaaatagcccataaattccaccatttggacataccccttctgaatttcagcacagttctttgcattacagcttttgtttgtcgttgtgttgtttcttggatgcgaacacattcatcttcttccccaagtttgagccaatagatatatattctatgactggaatttttttcttaagcagtatgtggtgtggtggtagatcttccttgtcaacttggctggatctagaatcagtatagaagcacacctctgaatatagtcttcagaaatatttatctgaggaaggaaggcccatcttgaatgtggcatcgccatgtcatggcttgagacacagaactacattcaaaagggcaaagtaagctgagcaccaatggtcattacttttgcttcctgactgatgacctgctgtgaccagcttcctcgtgttccagatgccctgcctgccctgctgtgatagactgtatgccctcaaattgaaacaagataagacttgggaggcagaggtaggtggatttctgagttcgaggccagcctggtctacagagtgagttccaggacagccagggctacacagagaaaccctgtctcgaaaaaccaaacaaacaaacaaacaaacaggataagtctttcctcctttcagttgctttttgtctgtatttaatactttagaatgttttacttatatagaaaaacatacatttaagaatgctatgtgtcaagcatggaaattgggattgaaggatggaataaaacaaacatagctggattttggttttgttgtttttgtttttgttttgttttgttttatggatcctaaagaccaatggaggtagcaaatatttcattcaaacatggaaatactacccattttcattatttctgaattctatgtttgcacatttatttacccataaaatgtacctgtaaacagcaatgtcaatgttatagctccttctctgtcattacatcccttgtaagtacacaccaaacattgcaaagtctgacttgtttaataaatatgttcccaacacaaacccagcaaggtatcaagcctgcttcttattgtagcttaatactgtaaaaaatatcattttggtggatccctgtatgtcacattttctctattttggttctcttcgataggaactttattgtttaaaatgtagtggtgaagttccatcttatgtcccagaaggctaggacgtgccttccagagacacgggtatactgaatgagctctgttcaggcatgagctaaggtggtattgtctgtgagttcagtgttaatgatcagcaatgtctcttaaacatgatatccataagcagaaacacacacataaaaggggacatatatccataagttgacaataatgatgtgactagaggaatataacccagcattttctctaggtaccaattctgtaattcagggcaactttattgaaaattgccttgagcatcaagaatcagctatatgtctgtgccgttcagtagaagaggacattcaggaatggggacatatgtttaggttttttggcttcagttatttaaaactattagataagcataattttaagacaaaataacatcattgctgtcatagagatgcagagatgagcatgattttatttaattcatgaatgaggaaactgatgagttagtcagcagagaggataacttgaagaccagaatatctgcatatcaggaatactgaaatgaatatgcaaatcaagcaaaactggcctttttctttgaggggaaagttgtccctcttccagaaagaaccatttgcatgtctatagacaagaattatgctgtattgctctcagttagctacagtttccagagtttccacagctctatagactcagcatcagatagcagggaagcaggattatagacaaagcatgtgtcccaataaaactttttttcccccacagaattctaataaatgtacttaacctatttagagtatgtggaagacaaagaagctaactctaaggaaaaccaacaccataagggtgggttgaagaggcagagcctgaaaacaaggactttcagaagagggggacaaccaggacacagccttagggtcagctgcaaggttgaggatggaaaactgtcaaccatctgaggtaccacactaagatatgctcaaaacacccctttggacctggcagcatggcagtactgacttagcacagacagctcttataggatatagcaggcacaagtggtgtgagtgggtagaatggaagcagaaagaagagttattttaagttcctggtatgctgtcatatggctgtgcaattgattatatggctgtgcaattgattatatccctggatatatgatttctggatatttaggtctttttaaatattcaaaaattataatttatatcttgatacacacacacacaaacacatatacacacacatacctaatttttccttgaataaattcctagcagtagctgagcctctgagcctttcaatactttttttttttttaatggatcagtttacacccagcccaactgtggacaacgagtctttggttggttggacacatgcatcatcgttattgtgcgttctctctttgctcccttgtacctcctaagacaacaactctgcaaataagtagtttggtgttcagagctgataaccaatggctcttatttcttatcactgcttgcaagtcacagcctctaatttggttatttggtgccaaatcaattctttcccttgttggccttcattcaggttaaatattggcaggttgttatctttccttttggctcaggttagccaggctctgactgagcacatgacatcttcctttctttctttgtccatttccttcacagcctcccatttttataacagcttgcttcctcttaggctatgaccactgctctatatctaagaacagtcctgtcttccatggagggatagagggactttctacctttatgtccctaaggttgctttctctctgtgttttcaaaataaagattttgtctgtagttgatttgccttgaagactttcatagagttgcatgcttgttttcttgtcttgaacttctgttcacagttgtgtatgcagaactgcactttgcacaattcttattataaaagtcctcccaggatgtcttaccagttcctgtggcttgaacccatgggcttgccctccttttgcctaaaaccctgcctatacaactaagtgctttccctatccatcatatacctacctcaaccgaccaatccgatgcccctttcatggtttctctcctttacccacctcctgccgacttctctgtcttaattctatttggtacaaaagcgatttgtttctgccctgttcagaaatctggggtcatttggaattttcctctttctctctttcccttcatgcccatgttgggaaaacactgtgcatttcccctcctcatccttatgttggtcacttcttctttgattttactcttccacccacagacaaagcctgtggaccctgttgtcacaaggtattctgtttttctttttatcttacatgtattaccaactgccttaccaggtttgaggaaccaggaaagtttctaaggtagatcattgccattttttgttcattttctagtaaattaggttctatttcaaattaatttttattattctgatttactttattatatcctagtggattttctcaataggaggggaatttatataaccaatagattcaaatacaaaatggtgctattggatctgctagattgtcacactgaggtgaccctcagtattactcaatggcacacacacacacacacacacaatnnnnnnnnnnnnnnnnnnnncaagaagagatgtctctccacttatttccttagtacctgtcatcatgatactctgtcctggtgtggtggcttgtgggactttcggttttgaagtgtgacctagattcatgctcttgcagcatatcagtggtatagccataggcaagtttactggactttgtaggacctcttctgttggcttggagtgacagtctgcctcttatgaggctgtctgcacataagcagcttcgtgaagagtggcttagacacttggaacatgacccatgacctaagaagatggtgagtctggagagctgtttttgatgagctgttctgaaccttgtggcacctgtaacgagctactctctggatcaacccatagctaatgccaaagaaaccctttggaagaataccttcaagcttgtagtgcgcctactccaagagggagcagcctgacatatttgggacaggattttctcaactgtattcagggtcactgtgttggatgtcctccctcagtcccttctctgcctgcttgtctgttttgggaggtgtatgttttcactgccattcatcttcctgtgcaaggaaggagccttccctcccctctcctggaccgcttcatctgccttcccttcctattgcttattgggaacctgcttctctctattccaagtgctaccaccctccctaggacattcagtgtaatcatgccaacacatgtattgcgccatatatccccactttacataaatgcagttctcccccacttttgtctttactgccattcaaaggccttcatgagattttccaactttccctaggccatccagccccctttctcattcagctccatggccaggtgctttctgtgctcacagaaatgttttagagcctgaagggacaagatatgaactcaaacatgtattgaaacgctgtattatcaaagtaacaagcatttaattttatccataatatactgaattttcttcatatattgtgtatgtatatatgtgtaatacgtaaactcagtagcacaaagaccttgtagggatgacagtaaattgcaggcaccatcaattatcacagaatgatagggaaagaaaaagttaaatctcctatagtttacaggggcaaaggcatagcaaggggtagctaatacagacagaggcagagagcaaagacaaaggggtcccaaggttgaacctgatcttcaaggccagtggagctttgaaactctctatcaaaccataataaaacacattacatacttcctccaatactaactataattttgtcatagttttgcaatgttcataaaaataaatttgcttttaatatcatttggttgttcataatttaagcagttataagtgcctattgatttttctaatcactttggattttgagaattctttgtgcaagaaaaactaacctatagtttactgtttaaagaaataaaatttttgaacagtaaatatatatatgatagtaaaagcaaatttatttttatgaacattgcaaaattatgacaaaattatagttagtattggaggaagaatgtaatgtgttttattatggtttgatagagagtttcaaaactccactggccttaaagatcaggttcaaccttgggacccctttgtctttgctctctgcctctgtctgtattagctaccccttgctatgcctttgcccctgtaaactataggaccatttaactttttctttccctatcattttagtgctgtgataattgatggtgcctccaatttactgtcatccctacaaggtctttgtgctactgagtttacgtattagcactctagttaagagtacagggctttgacataatgtagattgttcttattattaattagaaaatatgggtttgtcgaaagtgactgtcattaggaagtagaatgtggggggatgcagaggtggacttgagtgttgcccatctcaggttgccccaccacatgtactccatgggaaccaaaagatgacctattcaggaaatctgtgcagagtcacgtggcatgacacagagatagggagaagacagggactgggaaataacccttggcaagtggtcagaccattaacattgaccttaccattaacattgaccttacccaggatgtcatggctatcaccttcccctgtgcattccatagaaggtaggagaggctatggtaggcaggatcagttctaacagagtaaatagggtttctaagcaccatgagactaattggtggggaggaactcattgttccaagaagaagccagggtatgatctcccaatgacagagcaacagtggtctgggggaatctcaaggacaaggactcacaaaatctctaaaacattggtagtctagtatccagcatagcctggcagtaagcaagtgcccagaaatgtgttcctgtaataaagggctgcttgtcacaaccatgtacatagcattgtgcattcagagcagatagttcccctgaaagactttctgcagctgccctgatttcttaatgaaggtttaatgggtatttttttggtcattagaatagaatagaaacaggatatatggcagatctgttacttacattctctaagtgtgtattaatagcaaccgaagaatagaaacatctcttaaatatattgcatttatttatttgtgcatgggtgagggaacacatgccatgcgaaatcagaggacaacttgtaaggttggttttcagcctccagtgttgggttctaggaatcaaactcaggtcttcagacttgacagcaaggcctttagctactgagccatctgattggtccaatatcatctctcattaatttatttcagatgaagaaaaagttcagagaagaaaccctcttcctgttggctgcagggttgattaggggcagtgcagaggacctgagcctttgcctaaagctcctgcttcccctccccccactctgtaaggccacctcacttgaataccatcagaggtgttctgaaaagaggagacttttccttggtgatgagaaacctccctgggcttgtagtcacaccacacagatctcagatgtggccctctctctgtctcataatgattcttgctacagatttgagaacctctaccttctcatctgcaaaatgggaattttacctgacaggcttaaaatagggagatggataatttcactacagtgttctaaatagctgttttaaagttagaagttagtatagtatgcccattgtgttttgttttctatggttctgaggttgaaccctgggtctccacacactaggtgaatgctctaccactaagccacagtccccgacccacacgtattttcttatatttcactttggtaagtgaggaggtttgaccatgttcattaattctatctgatccaattaagcctgtgtctgttgtcttgtttaatctctcaatttgcaaacatttctctataaatgctctgttctatcataaatcaaacccaggtttgacagcatctaaatataaaagccattctgttgcccgtgtgaaaagacccacttggaaactgggtaaagtactctttctccactgtgatttttggagggaggggcaattttttttgaagatcttccttagagaaatggaagtttatatacttccccaatagctggagcatctctgggatttctcagttgtgttattttcttgtggtgcgcacacaaggctcaattacatctgctctctcttcttgtctttctttgtcacagtgacagagatgaatatttcctgctctatggttattttcctgagaagctaaaaatattggaaggaaattagtttttctcttctgccttatctttgcataagtgttctggggggggaatctcagagcagcttaggagatgacctctgctttattgtcactatagaaccatgacataagcccaagccacacagagtgaaggcccaggctctgttgatgttgaatctctcagtaagggctggcctctctgcctatctgcctgaaagaatcaagtgatggtttggatgagactactggtcaattccaattgagtctcatcccctgatttgacaaggttcactcccctgtagctgactgactattgttcatgactgatagcggtgactgatacatttttgaaaatagtgtgatcccagtgagaaaagagatatgtgtgtgtatgtgtgcatgattgtgtatgagtatgtgtgtatgtatgtgtgtgtatgaatgtatgtgtatgagtttgtatgtgtgtatgaatgtgtgtgtgtgtgtgtgtgtgtgtgtgtgtgtgtgtgtgtgtgtgtgtgtgtgtgtgaattagttgggagggagaaagcactgctttgctcctggtgttggggagtgcttgatgcaaatttctcagtgcttcagttattgccttgtcattgatagggtaggggactgagtactggttagggactcctgggtcttggttttgttattttcttgaagaagtttagtaatgcctctgcacttctttcatcctaatttttaaacttttttgtttgagatttgcatacatgtctaaaatgaaatatggtcatatatattctccatttgctccttccagcttctcccatagtccctaacacgtctctttcctaaattcataccttttggtaacccatgaactaagtccaatttgtgctactcatatattctgagtgtggggctgttttgtgggaccatgggaagcctgccagtagccacgccttcaaagaagagtgattttcccctagtagccatcaactgccatcgcatctcagtaaggagtggagtctagagatcgtctgcccatctaggagaggattttagcttggtcttagtgtggctcttattcaagtagtcaaaggcactgggagtttgtgcatgtgatacctgttgtcatagctggaagacagcatttcacaaagcactccctccctccagctcttatattattttcacttcctctttcaagattttctttagccttggcagtatatggcatgcaaaacatgtccgatttaggactgagcttctttttcacaaagcaaaacaaaacaaagcatgccattcaagagatatctaattacctaattaactaatattttccctcaccttttgtttcttttcttctctttcttcctttttcttaattgaaaaggggtcttatatattccaggatgacctagaacttctaatcctcttgtcaccaactacatgatactaggatgacctgttactaccatgtgctactaacctggtaactgtgtacattttcatgtggtgctgaggatccaatcccgggccatgtgcatattagacaaacactccactaacttagcaacatccagagcttgccattcttaccttcttattaaggttggatctttatctggtaatggctaaaagactacatttcccaggaccccatgcagttgagtacgaccatataactaagtttttatcaatgagatataagcaaatgggagcattctttgtaaggggccaacagttagttatggccacttactgctttcattcacatccttctgcatgacaggtatagacctgaggtaagtaaaccttgcctgcatccaggagcagaagtaaggcactcactgctttgtgcttcagacccttgagtgttaagtagattctcatactaactcagcttggttgtctctaacttcagaggaaattaagggagcgctatatctccttccactcaacaaacactttttacggtagataaagcccttggttcctcagataattacaaggagcaagggcattattggtttgtccagtgatcatatccgtttgattctgaggattctagtgatctttgataaagatggactttgatcaggttaagaatatgtgtcaatgaattcagtttggaggacatggcgagaccacagcatgagaaattctgtttagatcactctagtgatgggtgaataacgaggggacagagtgttctgcatgacccgtgtggtaaggttgtaacagtgccccattccagagcacactgcttatataaacttccatggacttctgcagtgggacttgtaaggaattccagtttaggcttgagatgatgtgttctgggctctctcagacccaggacagctcttcatgtgggcaggctctcactaaactacagaacaggctctctttaaagctgtggttctcaacctgtgggtgacgacttctttgggggtcgagtgatcctttcacaggggtcacctaagaccatctgcatatcagatgtttccattatcatatataactgtagcaaataacagttacgacatagcaatgacaataattttatgtttaggggtcaccacaacatgaggcaccgtattaaagggtcacagcattaggaaggttgagagccactgctttagcggttgtggaagagacataagtggaaccataagttttctgagactgaatgtgagggcttctctgccttacatgtttgtttttctctggggacaaagggtgtcttagaaatccagacaagtgacctaggataaagataaatgactgcagcatcccctttctctactaatgacatatattcacagaggaccccaagagtgaaatgctgatggaagtgaaccattgtgttcttgtaagcttcagactgcaatatggctgctggcaatgcagcaaattaaacaaggtggccccagacccaaggctaccgaggagtagtgtaaaactcaggatgagccatttcccctgagcatcagaggaaagacatggatgggccacacccaagcctctttcctctaagtgttctgggatacagtgctaccagtggagcagcagtcatttcttatgtggcttgccttctcccttagttattacttaaggatttcttttcatccaaaccatttagatgagattttcagcatccagggggtgaaagaaagcagaatctagatgccaagcttttcttctagttttgaaatctgggaggagctggtcactagaacctgggtttaacgagcatcagccagcctcacagacagtccttgttagcaggtttaggaagacatagccacatccccatctccctgactcctgtttctgcctttcagaggcacagagggtggcatgtgaaaggacagtgttgacagaggcaaggtcatggggctgagtgctaagtcctaggtgaagagcaccctggagatctgtcttattttatggctgagactctggggaactcgaaaattgaagggattcatctattaactgtcacagctgggcttctgggcaaggctgaacggctgagaaatggagcctgaagtctgccggagggataggtcaaggggagcacctggctgttggctggaccagagtggggagtatgaagggccatttgtttatctcgctcattcattcagtgggcatcttttctgtgacgcatactgagattgaggggtgagagctattctcttctgtctcaaatggctcaccatctcatccaagagagacatgtatgagctatgtgtgatatgcaggtatataagcaaccatcctgggtggggagacattaaggcagagactgaggtagagagataagtaggtgtggtttcttagaagaccttataaggagagaaagaaggaggagggactaagtcagggtagggccctttcatctgctctctgaagctacagattctagacatgagttgtgcagttaactctatgactctgaaagtgctgtgtgtctgtgttctctaacaggagaactaccagcagagagtatctactgtgccctcaaaatgtggtcagcatgtccaagttattaactatttgttgtattcagttctaatgtattaaagtttatatatgtacctatggcatacggctgccatggttaataacacacctgtgaagcttaaagttagaaagattttaccctaaagatgccttaggcctctgaagcaattctaagctgctattcaggcgggaaaataaccaaccatggacaggacgaaaaaaagatgtgactgcattcttccagtagctgttcccaaaacaaatgtgagatcttagtttagcccatggatcattaaatcaaaagacagagctttgtcctccacctctcttcagtaaagggctagccttgtatagcccatgacagtctgccattacttgtgggccactagggaaaggtgatactttatgggcaaagtgaattctgctaattgaaagagatttcctggaggaagcagagggtcctggtgggttgcttagatttcttaatcaactgccatcagggggtaaggggaaccaagtagtgtctaccagaatcattaacagttcctactgtgtgctcatcatgggccaggctagtattggacgagattctcctgtattatttccatccagttttttaatcttcagaatagctctaacaccagcgattcatgtcaaattcactggttttcaacagtttgatttagttggctttgtatcaattagcaagataggtattcagtcatcttcccctctctgttatgtgcatcctacctggaacatacacatgatgcctagccaggtggggtttttcctgctggagagcttttatttgcttttaaagaccccaatgaccttatcttccttcattctagatgtttctgtttactctcttcccctgtggtgttttccactccatgtttttccttcttattgggaaatctatgtctcaatgacttgtttcaagtttgtgcaaagcaaaggtacatcttgttttggctgtatgtggtttctctgggagatgaccctatgaaacacagaggaaaaagttgaagagacaggaaaggatcaagcatggtgttaacaggcagcctgcctctgtgtttctttctatggacagccttttagatacacatctcagaaagcagacacatgtccctcttcccttagactctaataggatgaaggttgttgctctaagtcactatcttaagacccaaggacaagcatattttattctttcagtgaatgtctcttcctcaaagttaagaccaatatagcaggctgcctatgatctccaggctctgagctgatgctgacaggtgttatacaaccttcataaaattttactagtcattcaaatccagaaggtttgttttccttccttccttcctccttccttccttccttccttccttccttccttccttccttccttcctccttcccttcctccctccctcctaccctcccacctgctctccctccctccctccctcnnnnnnnnnnnnnnnnnnnntcccacctgctctccctccctccctccctccctccctccctctctctctctctctctctctctctctctttcttttcttcatctcactttttcccccactctctccctcccgccccctctctccctttcccccctctctctcagcttcatgggatttgttgccaataagggaagtcatggctctcacctagtcactccccagagagatttcctggctgctcttaaagacaggtcctttagggtacactaaagactgctttgctgagtctttctgtttaagggatcatttctgtagggaaggcaagttgggaacttggctctcccaggaagatagctttatttctagtccatcctctggctggtgtactaggttcaactcgataaattcagcatgacaaacagcatgatcaagaagttacagtaagtccctaagatcatccctgcatgatcttaagcaatgacactgggaggattagtgaggctgtacccttctgcaggtcagtttcttcctctgtgtaatggaggtgatggcaagccttcagctggactgcaaaggaggaaatggatatgtacgtgtttaggactctgggaagcgcaggtggatgttagttatcgattacacactaagtgctgggattaaggcagtgtaaatggattgatgataattatcccagagctttactctaatatgtaggaagccatgactcttattcatcattggctaaagaggtttcctggctgctcttggagacaggccctttagggtacactaaaagatagtttttctgtgtatctctgtcaaagagcttatttctataggggaggcaggttaggaacttagctctcccaggaaagtggctttatttccagcccactctctggctattgtaccagaacttgaggccgacacacttgtataggtgagagcctgacctgctaatggtgaatctttgagacaagaaagagataatgtgaacttggaggcacagggcacaagtacattaatgtcctggttttgtagtctgcactgataaggtgagtacttgattactggatatgggcttttcatctaaggcacccattgtagatgtcagtacagagtctggaatgttatgatgtgtatattggaagtatgctctggtttgaggtgaggtatatattctgattctagaggctgcagaacccaaaaataaaaactatcacagagttcaaacaacatagattaccaggtctaggagaaacagggttgttaaacacttttagccacttgaagcctcagtcagtagtgggattttggagaagtggtgagagacagagacagggcctgagctgatttccagcaggacaattgggtagcccatacatctcttgctttcagaacactgtgtcatgaggggcactcaatactacaagcctttccatatctatataaggcatcctttcctgtggatgcatcctaatcagagaatgctttgctagtgaatgagaaagcactacgacctcagagtggaaggctcaggatagcttggtttgagaagcagcttcttggggcagactgaggagtgtataatggggactctgagggcaacactccaagattcaagccttgacttccttatttagtgaccatttgactttgggggaggacgtaagttatttgtgtctgatttttccatctctaaaatgaaggtaatgtcaaattatctcctggggtttgggataacaaagaaatgatacaatccatgtgaaattttgtcacaatgatagttcagtagatggtatcaatgtgtacaaagagaacagtacctgagaggttgtaaaagtgactgtgtacataataaggctttataacaaaacccatagaaccttggtggcatataatagacacgttactttgtatgagtctatgttttatcaaggcagttgtgttggcctgaaccagacctggaggatgtgcatactggatcagcatgtagatcatctagagctagatggcctgggtagcctcagctgtgataatgatactttgcgccatgagctctggaattctccagcaagctactttgggcttgttctcacagtaggagcaggggtccaagacagcaaggaaaagttcatacttctcttcctatctttcacttgtctgaagttttctgtttttacgttgtccaaaacaagtcatgtgatcatgcccagtgtcaaagtgggaggatggcacctggttatggaacaaaacagcagcgctacaaacaagcaactaaacgtggctataaatgtaatcggcagcactctggtctttctaataaacttcccaagggagggctagtcttggcaatgctcatttcaataattcatctctctcactagctaattgggctttttctcattgggagttactgatattaaaggacataacactattaccatccactaggctctttgttgatgccaattatttaatatttctagcttgagaggctgtggagagtatcagtaaggtaatttgcataaatccttttgtttaactcagagcagacaagttatattaactctataaatgtgacattatttctgtggctgttctattgactgatttatttgtttgttttatcgatactgtgtattaaacccagggccttctctgtaaaagacaggtaatgtaccagtggactcttccctcagcccttactttttattttgagacagtgtcttgctaaattgcccaagcctgattagaactaattctgtgatccagccaagctggaacttatgaatttcctgtctcagcctcccaagtggctgcgatgacatgcctgtgtcaccacacccagcttgatttgtggtttatttcctttgttttgatcatcctggggatgagtgtatgttatcttactctcaatgttggcatttccatcccatcttagcagatgaatctgacttaggatgttaacagctctcccagtgtcacatagctagtgaggggggagacctttcttaaattaaaatctggaatagtctttttatggagtgtgatgtgaaagagagaacacaggcaacggtagaaagtttgagccaaacctaaggtcatctcattttgggtcgaaggattttagttctgctgggcaggatcttacagagtatgcagatgctcttctgagtggacagacactttagccactcagcacactcttgtctcccagactgaccttccaggcttcctgggtaggggtgctactagtacagaaggttagctcacagatcaggattcatttaattggtagatttttaaatcttctggggtaagctcagcaactccgccctctcagccccacactagctttaaaggcagttgttggttccattggaaattagggtcagtaaatgaccctaaatttaatacaggtggatctaccctggagctagtgttcaatgataccagagaagaccataaatgtctagtagaagcagttttctagttcccagtatccaggaggaatactgccttcagccctccctggatcttgttgagggagaaacaagagcatttacatttaggaagtcttccaccatccctgcagtaaaaactctcagtgatgactactaatgtgatttcttcctcgtaagctttacgtcaaaaaaaaaaaaatcttgtacttacatgtatgtgaatgcatctttatgcatgtatgcacacatgcatgtgagtagccactgaggccagattccatcaggcatcctggagttggagttgcaggtgtttgtgagccccctgatgtgagtgctgagaacttaactctggtcctctggagaatgctctggaagcattcttattcaacaaactatctctctagcccttaaatgatttcttgataagtgttaggtgggaatagagggacaagagagaagaagaaaggattctatcagaaaatatttacaatccatcaaaatattatacactcttacttaccctgttgcttattcatctatggctccactgtgttctaagggtgcagttctcagctcatgtcaagatgctaaaagggacactgctggcagtagattggcagagtcatttcagaagggactataaatgtgtaccaaaggctttaaaatggttcatagtaatctaatataggagaaaattaccataaagaatcaatctaaacaaggatagaactacatgtggggaaaggtatgtgagcaaaaattggaaacagacctaagtgcccgagaataagataatggttcagtaaatcatggctagtctacttagtggaatattatgtggctattaaaatggtaattatagatgctattgagcaacatgggaaatgcttatgatagaatggcaaataaaccaacccagagacaccattgaacatacacaatgattaaaactatgcaaaaatgggcttgtgttgtcacaaatggtgtagcaccagcaacaatacatattctaaatttccagccagagggaggtagagtaaggcttctatctaggaagcaaaacagggttgactaatcagggttgctcagagcaaacggatggcaatctcaatagcaatggaagtctcctatgagttttaaatttctttagcaagttttattttgcaatgaatgctgcagattttatattgcataaatctaagtatctttatattctacagttccttcaaagctgtgtgttttaatgtatatcaggattcaagcaacacatggcccagcaagcccatttgatgagctccttggacctggtaaaagtgggtatgctagaggactttggaatgaaactagattgcagtgggtgaaggcaaggaaggcatgggatgtttagacaactgtttcatgagggtcaactgtaaagaggaggtgtcatacaggttcattgatactgaaggacatttggttaaaatttccaactttaccatattgtttgaaatgtcatgattgctatatttagcccaaatgccgatgtgatgaacaatgtcagactaaagaggaacacccaagttctagagtgaagtgtaaagcagttaatgtctgaatagttctatagttttcctttatacaacctaaaaagggaatcttttgattagtttgtgtctgcttttttcaagtttagagttaccagagtgggaatgtagatgttgagaatcaagaaaaccaagaggctgagataaaacaagataaaatcttgtcctgtagataatgacaggatcttggggaaagtcctctggtaatggtttgtttggtttggtttggtttggtttggtttgccttggtttggtttgccttggtttagtttggttaggtttggtttggtttagcagaatcccatcctttgtgcttagtgatagttttcccttttttgccctctgccagatgctgaagaaattgcagagagtggattggagctgagatctggggaatgctatgggagtgaacagagctaattaggagctagaacagaagcagctccaaaggtagcgagcagccaagacaccggaagtccagtgctctgaggaaatcaggaagtcctgtggtcctctgagcaggaagtccagtgtccaaaacttctaataaagatgaccaccactgctctctgtcctattatttcttggcttgtattttaaaagtgcaaatgccagcctcaggtggctacagagcaactctaaaaggataaaattatattgtgacaaagacaggttccttgtaggagaggtcaagtgtgaatttgggcattttttctgaactggctcaaatttaaaggttaacttgtcctcctactgggaacattaataactaaaagcagcaaatgggaagataatttaaattttttatatttgagttctaaaaatctacctcaagccttataattaagatgcaatgacaatctttgtaacaagaaatttttcccctggcttttcttttaatatgaagaacttaaatgggctctgcttttataattctccattaatttataggtttattttattcagcatcatagtgtctaagaaaactctttataaccaaaatgtaaaactcagatccaacacacttattataaatattttaaattaaaatgataatgtacccaagcatctgagtgaagacacttggacaaaggatgtggatactaacagtgaaacgctttctacggtgtttatttagttctgtcacttggccttcagtatgtattttatttccttatatctgaacatgcactgctgaacattcagtctcttgaaaatacattctgtatagcagaggtatgcttagttggaaatgagaggggtaggtacacattaaccattttttttttcgtggctcatcttcataatcaacataactttggaccagtctgtgatgatgtttcccctgagatttaacagaagatggaagacccaccctgtatatgtggcctgtaccctcccttaggccggggttctgaactgcatcaaaaagaaaaagaaagaaagctgagtgccagttttttatctcttctgcttcctagatgcaatgtgactagccacctcacatttcctctgccttgccttcactctcttccctgccttccctgtcatgacttaatgttccttaaaacctcaagccaaagtcaatccttccttccttatgtggcttttgctgggtatttgaccacagcaataaggaaagtaactaatatgacttacatagatgaaagtccactgggtattaagttataaaacatgagctggactttgtattttatccatagacttgggaatgagaccggttgagaggaaagcaagtgtaaatgagcacaaaaagacatgagttgtgtttgtacatggttgggactagtcctataggaaagagtgaatattccaccctgctagactgatatcccagagcagagttccgacctgttgacctgttttatggtattatcaactctcctttcatttgtgaccaggtctcaactttagtcttggtgacatgggctaaggctgttaaactaaatgacagagtgcaatttctacagatagaatcagtgctatgctgatatttgaccctctcacacaaaaaccctgatcatcagtgttggccaatcagcataatatctccagtgtgactgatttcaaggtcagtgtagaatagcaggatataggcttagaaagagatgtgcacagttagcgcttgggaacagttacattatacaattctttatacctaggaggtttctcatgcagtgtacgcccttatttatagattgtttatgtaaacccaggattgggtttgaaaccttcaacccttgtcttattgctttgccaacctggaagctggcttatttaggttagagttcatttatcccaactactctgcttatttaacaaatattcaatgaatgcctgtcatatatcatctactttcttgagcattgaatataacagcaaatgaagaatggagtattagtaaatgaatatcacaaagtgatatgaaaacttaaggtggaagatataaaatgaacaaaggcagtagtctgttcctgatgcaaggctgatggaaggcacactgattacaagtcatgccatcaatgtccaccttagaaccccacagtgcatatgtccaccttaaacccctacagtgcttatgtctacccctacagtgcatatatccaccttaaaaccctacagtacacatgttccccttaaaaccctacagtgcatatgtcccccttaaaaatcctacagtgcattcttgcagtcacatgtgagtgtactgctctgtttgccagaagtttgcttctccctaagggatttttgtctagtatatacacatccactatgataatcgtcttcaggctgactttttccacctgctaggaggtagtaaaaagaacaattcacaccacagcattaagattttacaagctgcatgtgactgatatgaattgttcattggcacttacttttaactattaaatattcnnnnnnnnnnnnnnnnnnnntcttgagcattgaatataacagcaaaagaagaatggagtattagtaaatgaatatcacaaagtgatatgaaaacttaaggtggaagatataaaatgaacaaaggcagtagtctgttcctgatgcaaggctgatggaaggcacactgattacaagtcatgccatcaatgtccaccttagaaccccacagtgcatatgtccaccttaaaaccctacagtgcttatgtcccccttaaaaatcctacagtgcattcttgcagtcacatgtgagtgtactgctctgtttgccagaagtttgcttctccctaagggatttttgtctagtatataccacatccactatgataatcgtcttcaggctgactttttccacctgctaggaggtagtaaaaagaacaattcacaccacagcattaagattttacaagctgcatgtgactgatatgaattgttcattggcacttacttttaactattaaatattcttaattctccacccatgtgagacttttgatcgcccttggaattataaaggaatacgagggcttgggtaccctctatatgatcacaatatgcagttgttcttctgatgtttgaatggtctaagaatatgtaaaaatagccaagcacagggtcaatgtagcctcatattactgaaatcattagtcagctttactaatttcataagtaccaattttaagggacatattcagtattaagtcaaggacattccttaaaagaccatggcagagacctcactgctagctaatagttatttcttgcgagtcatgtataaaacggcattgtatgcagatgcatacatgctggcatggacattgggcttacagaaaacagggcgatgagggttaactaacaatagaaaatagcatccagtgggtgcttgcagctccatgtgggtctccttctgggagctgggtttctatctcaccattctcattatctatataatggaatcttacctaggtttatacatatctaaaaaccaaaataaaaacccaaggcttccaggaagagatgttatgaactctatatatgtacttctggaatcttagcacatccaaaacgaagaattatgactgtgtttgttcaacaacagtcatctatgcacatttctaaacatatctgttattctcattacaagcaattccagcaacaaaagaaataacaatttttcagggattataagttcatataattgcacatcagaggaaaatatggatattaaagcctcgtaaatgttgaaatgcagcacattgttgcctattattttttcaatttcttgctcatgaatttcagcttgaagtacatccatccccccacccccaccaccaccaccattttgccctcttgtttatagatttcaggaataaaatttaccatgacatggaacttaagtatttcttgctattgaaattctctacactataaactgtttattgcaatatttgcttccgtagcttccatgactcctctagaggcatgtgcgtccgtcgggttttagctcaggcttctaagcctgtctttctaaagtttgtcatcctaggcccagggctttgagtgacttttgtccttgagctctgtcatctttgtgctcccaaggtctttgtgataaaggaagaaagaaataggtaggacccactggctcttcattacccgaacctaacaataagaagtacatttgtgcttctagcccattggcctcagcgttttagacaagttgggcttcctgcttcagttttgtttgtatctcatctcaagactgaattgggaatcatcagggaactcacaaaactacattcattctccctaccctcaattataacaaaatgtcatactggagagtaagcagaagctgccatttcctgtctgtgtgatacagagttttcaaattatgtggctactctccgagtgaagttgtgtgtcctcccaaagattgtttgctatttttagtctggaagatgcctagctgcatttgatctaactctgggacataaaatacatttagagtttcaatatttgggtttgtctgctactctttgctggtttcaatctaagagagcaagtgcatagggttttctagtgactcgatttcaggtggcttctgcagtgatcaagatggaagacttttcaaaaacttagaatgttcaaagtctggtttctagcccgagttgtgacaggttgtattttgttcttcatataaattgcaaatggagatagagactgcagtcattctcataatacatttttccacttggcagggtttggctgagtattttctgagttgtcctttcgaaatagattgcctattactagacttgatagatactatcatggggaactaaatccactttcatgacaaatctgtgactcccactgctgggactcccataagcaaatgacttccagcatatagtcctgaatgccggtctcatcaagccatccttgctttgatgattggcaaaaaggactgacagaactcaggaaagcgtttacaccagtggtcacagcttaacatggtaagagaacataggttgagatcagcccagggctgatttgaatgagtttacatggtagaacacaagaagaaccaagcatgaggcttcagtctttccctcagtggacttgaaacagtagtgtgtgtgctcagctataacatgtgacaacacataggaagtggccaagctggccatctcctgagccttgggttcctgttttctaattaggggtactataggcttaacatgatcatttgactaaacccaactccttggttgaggagctggcagtcctccccaggggccaaaatgatagaacatagcccagaggtacagatggacaaaaacaggcattcacaggcatttgttaagcatcaattattgaacatgccccaagatctcaggaatcctaagggtcagattagagacctcaagggtttctttaagatctcatgcccaaagtagggcagggtttcctttgttgtacagcattttaccccttaaactttaccgaattgagcctttttatgcaagaaacatgtcagtctctgagagctgcctcaaccaaagtcagattgcttcttagggcagctggggtcatgatccattgaaatacaaggtatgaatgcttggtatcttggccttaccacaggacgtttaactggaccattctagctctaggaggctgactgaagctgttcttgagtctccaccacaactgtactctgcctcactgctgctaacccctctttatctccatagctgttagtgtcaaggcaaccatgtgatgagtgccgtccttgctgagctccgagtcagcttctcagaggacctgtcaggtgacaatatgtgaatcagtatattcagttgttggtcattttgtctcttctgaatgattttattttggtcttgtttgccaggatcattattgaattgtggactgttgaaagtgaagttggaggaaaaaaaagtgctttttcttaaataaacagtctcaatgtattcaccaccaggtggtagaaaaattccatcttttttctttaaacctatttccccaacactaggcttcatcttcttggatttagactttttgttcaagaagggtacaattgtctttatgttatctcaggttacaaatattaattcctcatgacaccatcaaagatcttgtagaaaataggcatctggctgatggactggttgcaggcacaattgctttagttgaggattcttctctctgaaattttttcttcatctttctaccatgactaagataagaagcccccaagaatgaagtcctgtcagtagtccaaggggacagaaatgtcagtcacatagagagtatctgtgccatcaaaccctgtgcatggtgcttcccatatttccaacgttactgatcctaacttgtagctaacattcttagtagtagctacctatatcctgctgtcagggccgttgtgagttatattagactaatgcttccagtctctaatagctcttgtttctggatacctgcccagcagatactttaacaccttattttgtgtccacacatttgtataaaaaaatttgtggatatataacataggattttgagttaaagtatattaaataaataaagtgttgaaaaccaggggattttaatattctgtttatactatgaatcaagtcacacaagagttgaaaagtagcaatgaattattgacatctatatacctgggtagaatctgatgcagcataattctgtcctccttgcctgatggtgagcaagtatggagctcttttccctctctcacccttagacataatttttatattagtataaaaaaattgtgattttattttggtctgtttgccaggatcattattgaattatcgactgttgaaagttaagttgggtggcacaacaaattctgtaacaaattagcacaaatattgtagtttaaaaaataagtatattatatgatagttacacattctcttctaactttctagaggtcaaaggtcaaaaataggtctcatattgacttccagaagctcttggggtttatctatcttttttcctctcctagctactaaggcttaagtgaagttctggagaagaaccttcagatctttcttgggcactagtctctttcagttataaagacctttgtaattatttgaaccaccaggtaatcatgagtcagaaccctttttcaagatctgtaatcataccagtagagcacatcttataaagtacagtgatattgttacgtgttttggtggttagggtgtaaatgtctttgcaagatggtggtgtgggatacagcgcttcttccagttgcctgtcatagtgggattctttttttaatttttatttttaatttttttattagatattttctttatttacatttcaaaggctatcccttttcctagtttcccctcggaaagtcccttatcctctcccccttccccctgctccccaacctacccactcccatttcctggcccaggcattcccctatactggggcatagaaccttcacaggaccaagagtctctcctcccattaatgaccgactaggccatcctcagctatatatgcagcttgtgccaggaatctctccatgtgttttggtggtttagttccagggcgctctggggttactggttagttcatattgttcctcctaggaggcttcttgatgcactatggaacccattgccacgaacatctgttttgttttctttattttgttttgtttttcccaattgtgtgactacttctcagggatgttttgagttgtacctggttcctctgttctttgatctttggcctgtgatggggcctgttcactacaggtcagctttgcattctggtctcgtcctgctctttagtcaaccttaagtcactgctggtttcataagctactctctatgttcagggtcttcactcagaataccaagggacacatgggttctgcaagtgctagagggccactgagaagagatccctcacaccaggtacccatagaaaatactttacaataagcaatggtttaaggcatcctgataatggaaggttggaagatagatcccatggtgtggacattctcagtcccatgcggtcacattcccctcttgctgaggtgtgcaccagctcttttgtggcgtctctcatgacacagtttctttaacttgtcctcttcttaacacaccatcaccatagtcgactgttgtgtgtattcattgacaactatagttccattttctctatttagaaacaaatgtaattacttaaactaaagaagaaagaactacttttgcagcaaaatcaaaatgtatatcaatactcataactataattatctctcaagaaaaaaatgtcctcactggcttttcttagcaatgaggaagactcttgatagtgtatggtgacttatgaagtcatatgggccagttctttatctcagacatgagccaaacttactcaacttgccccaggagtcagcagatcatgaaggccaaactcaaatactactatagggcaggaaaatactgaagaatacatttttgtgaggcaaatgtatctagatttgaattattattggatataccacatgccaagtcgataatgtaaagttccatcaagtacatgtgtgtgtgtgtgtgtgtgtgtgtgtgtgtgtgtgtgtgtgtgtgtgtgtttgggaagtcacatggtatcataatgacagttaaaattatagaaataaacataaccatagttaggtcctagcaaaaccttatgtcttagtacatgctgtctttggtccctgggtcataatcttccgtctgtaacatcttaaaacttttcatggttctaataatgagtactaaaagtttactttcaagatattattggaacttaattgagatagtgtgtgtgagtatgtgtgtatgtgtgtatgtgtgtctctgttggtctctctctctgcgtgtatgtatgtatgtatgtatgtaagtatgtatgtatgtatgtatgtatgtgatacttagtacaatacctggtccaaatagaggctctatatgtcatttgatagatgaatatatagatatgtgaatgagataatagagctaggcagggagaaagaatgaaaaaggtgtgaataatcatctcaaaaatgtattggatgacaaattttcaatttctagaacatctagagatgttcctaactaagagataggggaatgagcagagtgagttattcaagtgacttaagatttgtctcatgaacagagcaatgacgctgcactttctcctttgcttcctcataactggcctccaggaattgaggaaaatcgtttgcattccagagtggcctcagcattaccagtgtcttgcccctgccacacccacactcccttcctctattgctccagctgtcctgctgacacccatatagatgatttctacaaatggttgacctgacttctgcatgaaggaacttcatctgggacagtgctctcatgtccgagcaaagacagacttcacaacgtatgaaagtatccccactgcttattaagcattcttgggaaagaaaaacaaagaggttcacaatagtgtttttacctttatttttcatatttaaaatagactatagcagcttattagtgaaatctttaactacatttttgaaaagaaaaaacaggatatgtgcaaataaagttttcctaaaacactgaaaagtagacttataaaattatttagttaaagaatacatatatatatatacacacatacatacatacatatatctttatccaaatatgggtataaaaatcttttacctaccctactgcctaattattggctcagatatatgtggcttattcaaactaccacatgaatgctacttttcatgataaacatatgattaaacagtgtgataaaatatatccaaagctttttaagaatttgaacaagaataaaagtgaaattgtatagaaaattgaagcttactcttccagaatctcattggtgtgcttggtcacccagggtccagcttgaatagtgtgttcaccatttaggatgaattaggtgaaaatatgcagaggttttgattatttcctgtaagaaacgagattggctctgtgtagggatgcttcccaatcatatgtaagtgttatttacgtgaatatgtatgtgtggtaccagccgatgaatcctcattacagcttattttctgtaggcagagaggtgagactttagtcaagatttcttttcacctttgttgctagactgaagattgaggaggtgacagacaactctgagttaagtcaaaccaccatgttgaatgtgtatctaatgtcatgggctatgtcagaaaaccaagtatttgccctgaggcacacaaatagaaaaattctaccaattttaattagttttctcatcaccatgacaatgaacctaatacctcttgaaggaaaaatatttattttgactaatggtttaagggggtttaaacccttgtttgctttgctccatgtgattgaacagaacactctagtgatgggagtgtgtgtaaaaggaggatacctgcctcctggcagacaggaagcagaacaagggaagggctaggaatcaggcataactttcaagttcatgtccttggtacctgcttcctccagtgagggtgaatctcctaacattcccagaatgtctcaaaaatatgtcaccagccagtaccaaacatttgactataagcctgctcagggacatttactattcaaaccatagccccacttaactctctgactgctcccacaactctcattctctccataataaagagcatcctgcatacaggctcctccatgagtgtgcagtgaaccctgtggtttctctttaatctcacaggatcttgggaatgaaaggtccaggctatggctaagaaacttataatgattagcctcagagctggagagtgacaagaacaatggagacagaatatctttaatgtattcagttaagtcttttctaaggctctggagcagtgaggtaaactgggcttcatagttaggattttcagctggtcaatccaagtatgctggcataatccccgatgtcttaaatcttgatacactttaaaggacctcctagtttgtcattatctatgggactactttgtcagcattcagtgtgtgtgtgtgtgtatgtgtgtgtgtgtgtatgtgtgtgtgtgtgtatatgtgtgtatgtgtgtgtatgtgtgtatgtgtatgtgtgtgtatatgtgtgtatgtgtgtgtgtatgtatgtgtgtatatgtgtgtatgtgtgtgtgtgtgtatgtgtgtgtatatgtgtttatgtgtgtgtgtgtttatgtgtgtgtatgtgtgtatatgtgtgtgtatgtgtgtgtgtgtgtgtgttatattgtgtgagtctgtgtgtaggtgtgccgccaagtttcatatcaacttgacacaagccgcatcatctgagaggaaggactgccaattgagaaaatgtctccataagccgccaggaaggtcccagttgaatcagagcctttactgtggctcccctagggagcctgtggccagcaggtatggatctctataagccattctaggctagtcttgattcttcactcttcattacatttgtcttgtttctctcatgttctctctgtagactgcctccaccacttggcagaatgaggcgggtcactgaataccaaatgggtgatgttctctccctaatgattgttaatcaagtctgacttgaagctgtcgtatttcatagcatcccagccctcaaatctcagtttgttaacatgctctgcatttctcccttgcctgctgtttttcataacactcagagctaagttggaccaaggaaatgaatactccgaacaccagtctcatgtcaacttagggcatcctgcaaccttgtgagtgttggctcaattctcccaacatgctgcttgctgtcttttacctgatatgtatttaaaaaaataaaacaaagccaaaaaaacccagcattttcagctgtctgggcaacacagtaaatgcaataggctacttgcaatattaataaccaatgtggttttaaccttatgttcccgataaaggaattctctgccgtttaaagctctgagatgaataatagctgagtgtttctattgtcctcttaaaatggagctcactatatgttgaatcacaacagcacgactttttataggttgtgaatagcataaaggcccatcatctccttgcaggctgcgccaagtgaatggataatggcaaaccaattattataaataatgccttgtttccttctggcccctgtgcagatttcaaagaatgggactctattaaaggctgggagattaaattaagtgagacactgttagaaccagcacctagcacagtgcctggcacgctggttgaaccatgatctcagtccagcagcgtctctgttgttctgggtaggtgattttgttttgtggttgttcactctgacatgagtctagtcctgagtgaagcctggcagggcatgatcccaggatgctttgcagtactcccagaatgctgttggattgggctggttgcagtagaactagaggaggcaagcagaccaaaacattctagcagaggcagtagggctaagcttagtgactacaagggaaaggttggctctagaatctgggaagatcaggggatcctgctgaaatgttggtggggagcattccaaagttagggttccagaaacacacctatgaattgaacatcctggaggatggctgggtggtgaactaaggtgttcttcaaactcttatggttgtaggacccttgggaaataaggccatgtctcccacgcctcatatcctgatagtacagcactgagtcctatcactaccacatcacatcctgttccacagagtttaactcttttcttgtgagcattattgaggtaagggtggtgggttaagtgtgttctaatttccaagcttgggattgattttactaataactatatgaggtattttccagtatacaaaattgttctcttcccatgataaacctatattttaaagccattaactttcgtttctaaccttttattattttctattttgacttctattgttctatgttgctcactacttaacaccttgctattcacaattctaattctatccagtgacagggccaaagaccaaggtgagtggacagcaggaagtataatttaatatagatacatctctaatagttgcaagctgagatggtaattttaaagccagcatcacacaattcaatggcatgcccatgacagggtgatccttgacatgaattaaatttgaatcttctccattctcagaaaatatattcttcttttcccaaagccctgcacatggagggtatctattgaaaattgtagatatcaaagacttgagcaaaattttatttgtgaatatttatacaagaactatcaagtccttcagctagtagcctcctctccctcctgattccctttaccctttcaaatgcatctttggttctcctgaatctccatcaatgcttcacttagttgcttgcaactatctttatatgtgggccagtccagaggcatgtgatagttgggtgaagttgccatgcaagagaaaaagaggtaggtagagagacttgtgactcaccagaatctatatagtgctctaactcctgggggagatgatactggggaaggaggaaggaagagcaagccatcctagggatgtaagcattaagcacatggctcgtgttgggtcaggagatgccgtgcaagcaatccaaagcataactgcagagttgtgtttaaggattcagtcattggaacctcatgtttgctggtatcccttaaagagaaggagtaaaagaaattaccagttcagcagcaacagtacccatgaccaccattttgcaacatctagaggagagctgatagggaataggctaaggacaagaaagtgtatataaatatcttcgttttactctttggcctaaattggctatgaagtagagtggagggtttggagagatacagagatacaaggtctggttcttcagggcaggaacaggacagagttgtctaaatccccatgggaagaaggcctgtgcagagcaagtggtaaaagccggaagtaggaggagtaatggatgtgggtgaggatcaagataaggctggaggttaagggtccaggacccagggaaataacagccccctgtttactcgtagagcagaaggaaatggatgtgaatggcggttcagactttccagggggcagtcagaataattcctctggggtctgttaagaaggatgtagggtcatctcttattgggggggggggggggaattcaggaaaatgacaaaggtctgaaaaggcaggtctggagatcaggagagagaatgcagccaaagcatggggaaggtctaactctttcgaccttggtgccctttgctgtcactctgagctgtcttttctagcaggactcaatggcctagttggcatagattcaaagggagtgactgcctgggctcagggaagacattacaacttaaattgcccccttcatctgtagagttctaattcttagatcacagaagtgaccttatttgtaactagggtcattgtggatgtaattacgttgagatgaacacaccagattgaagtctaatccaatgctactagtgtctttatggaaaagagcaatttagatttacagacatatacgctgggaaatgccaggggaagatatatacggacattggggtgatgctgccttaagctaagagatgatgaaggagagtggtgtccaagccatcagaggaggcaaagaaagagggaaggggagtcaaacctgctgataccttgacatcagtcctctggcctcacaaactgtgagcctattacagtttcggggggttaagcctcccagttgatggaacttgattaaggaagctctgggattctgatagagaggggttgggacatttgatttggtttttcctcttttccttcccaaaggacggactgacaaaaacattttgaggatacagtattcttgaggagagagccccaagaatacaaggcaggtaaagaaagagagacaaaagactacagggaagggagaagatgggatgcatgcggtatgggaatgttcttcagctcccacagtgctaagtgtaattagaccacaggatcacagcttcttggagaaagtctctaccctacccacccatgatttctgcagcaaaggttaatcctagcctccgggtccttgctacaatgatcaggatgttacaccccagattataactgcagcttagatcagagccaaggtatttgcaaattgttggttcattgtaggccctggctttcatttacatatgataaccacagaccttagatatcctcagagggactttcaaatgatctgagacctgtgtctcttcaaaggcctgtataactaggatggatttaatgggctattcacccccatgattcagcatttcctacgttccagcacttggagaatttgctcattagcttcgagaggcagctttttaatggaataaaataagaggaaaagcgggttgtggtttcaaaagttactgtgattaaaatcatatggacagctgctgttcagtgtagtgtctcccagtgtgaatgaaaaagtactctgtctgacagccactgggctgtaaattctgtttattgtatagatctttctgtgcctttaaagtttccaaagcagtgtgtgaatagatagcattggtaggaaatcgatttctttaaaataatcctaatataaagagtaactgtcttcattgaagaaaatttggaaaatacatttaagcaaatatctttttaaaagcagataatctcttgagttttaacatttagggtgtgtatccatctggtgccttcttgtctgctcatacatatatatgcatacatttactaatttggaatcatactgtaaatacagttttcaaacttgctttagttaacgcatcctaaccacaatcctatgctagctatggagatactctttctgccatgtggttatcatgatttatttaattgatctccttcctctggaaatttagattgaattttaggttttttctattaaaaaggattcaatgtacatttttcaatatgtaattttaaagaaaagaaaagaaatgaaaaaagcctgaggcttctaggtttactttctgatatagggaaggacagccagggaatggcattggcacctaggtgtagagggctgtcagttgctccactatccctaaagggaggcctcttttgtgcactaaatgtaaggtccttggaggcggtcattgcctgatctttagttggtcaactttagcaggcagttcatacaagcagaacagcctttggtaatggcagcatggaaaatggacctaagtgctcagtgcaattagcaagaggtgcaatctgagggggtggtactcagacattgtgctggttcctccctgaggagctggggctgtgtgactcacagcagaagggggtgcacttgggtgcttctgctccccccgtccccttctccatcttctcaagactgaaaattcataagctgttctcagtgacagttgtgcaaaatgaaaagctctgtgaatgtgtggagaatagattatcctgactgctgttaagcgtttgacaaattgggagttttgtcatacatcaaagaacaatagagggagaataaggaacgatgtgcatcatataaatacaacatacctgatggctcctggcaccatttatcttcctggggggtggggctgaggaggactacagggaggcaagtgggaagagggaggtcactggccccaggaggctttgaaaaccaacccatgatcaagatcaaggactatgtctctggatatcccaggccatttaggggtttttctcattgtgatttcttaaactatgaattatggggagaaatttcctgaatctgaaagggaagggggtctgtgaagctactggtccatcaagcaagagtcttgtgtcctctagaatgtagaggacgtggagaattagctgcttagagtctggtagagctctgtctagcaataaatacaatgggaaggtaggtgccggaacaacagctctgtttctgtttttctctcccagccacagcttctaccacccttagcagagggatgccaagctccaagtgggggcagtttggttcagtcttggggcgcaaaagagcttgcatagactatacaatggcttccactgtagatggaagccctggcccttatatacaacacaaagagaaacatgcagagaaggctagaggtagcaaactttcctgaaggtttgtaggagaaggtaagaaggccttaacagtgcatcttcacatccctttagcaatggggtattgaaggtgtggacagcctttggcagccatgtgcagacctcttcatgcctgggatgttggtgtgcattatagcaagaaccaatagagtttacttatgggaattgtgaaaaggctataaatctcattgcagtgatgatcccacaactctatgaatatactaaaatgcatttatataattccaaaggttgaattatatgacatgtgtattatgtttctgttaagccactattcttcccaacccaaggaaaggagacagagagtatctggcacacagcgggggaacatatttatatagacttgagttttttcccatctcacagatgcctatggaaaaggttgacaagccctcagctcccagctttccaagttcaagtctttagagtctgctccttaaaatgttgtctgctttccaaaagcagacacccagccttcatttaaacccaaagagcttactatgatgacattcttagtcggataattgtgctccaaaaactccagggtgtgagctaacagcccagtttccatcaattcaaatctttccccatgtcttgagagatcattcttatatatttgagtgtctatgttgagtctgtataccatattgcagaagaatttgctggaagggaaaaaatggtggtagaaaagaagtctttgtgctgtctaacgcagattttcttgtagtaattgaagcctgcttcccactgcctgtctgaattctggcatctgctgaggcttagatgcctggagtcaaatggaataagtgcctctttggagagcagctcctggaggccactgagtttttgtcacatgtcagtggcatctgcatatggatgtgaaatgtatatttaaaaatgtgcacacacttgactgcacccatgtcctgttccaaatgtgtttatccagttgcccatcacagatccatcctgaaggtttgggggattaggggctggctgaccaattcacctttgtctcccagcccatagccttccagagcattgaatgcccccagtcacctttgtgacttcctcctcctccctggaataacaaggctaaaggattgagcttcatggttggttacctgggagatggatttgttaccttggtagaagaaaactggaagccacagctactactgcagccagcaaggaaatagcaaggggtgagtgtagagtttggagtcagccgacttgtttttgagtactggttgaggcatttagcagccatgtgaaattgagtatatcaagacacttctcttggtctcacacataaagataaagtcttagatttcctgtggatgccagatctatgctttaaaaatattgaaagtgatgtgttccacagtccccttaatgagcatgtcttaatgatctaaagacctcccctggtctccaccttgtaaggatcccgacaacttccagaagtcccaccctgaagattaggcctttaacacatgcatatttgacgaacactcaagatccaaactgtagccccagccccataggaaaccctgaaatctttcccaatagaaagttgaaaacattgacaaccccccaaccccctacaacttatcccactgtggaagagcctttgcccccttccatggagttgggcaggctgtgactcttcctccctatggagaaaagtcagaacaatgttttcaaaaggttttctcctaacactctctgttcccatggtgctctttttcagaattaccctcaggcagtgaaaagtacacatcacatgacaagacacatgtctgtgctctaagtgacagtcccagcccagctgaccttcagccatgctaacccaagcacaagacacatgagggaaaaagacatattagaaattcattcttctagtcccagtttcccccaccctcgaatagaaatccttgtcaccctgaacatcccagtcttcccagttgacatcccaggcactatagagtggaagaaaacatccatgccagaccttcctggtaccctgaattagtgatctcttatctgttgtttttagaattgttaggcattaaatttgtgtatccacccaccgccaatttccatgaggttggacctttagggagaaatagaattaaaagagatcatgaaagtgggacctctgggatgggattagcatctttctaaacatgaaaagatgtcagagtcacatgccccacccgtctctctccctctacacacaccaagggcatgccatgagagcgcatagcaagaaagtagttgtctgcaagtcaggaagaccaatcagctttatcctgctgatgccttgctcttaaacttccagcctctaaaatgattagaaaataaacatgtactatttaaagcacccagggtatggtatttcattataacagtcaaatgtacttctctgtagcacaagagatgtggaattacctagattggcctctgatgtttgctatttgggtccttggtcatcatagaggtagtctccagggtataaattcatcatagcaaattctctccaggagagaaatgtgtttcaaacaggcattctctggcagagtgggtttggcttctctttcttcccagtgcccactgtgataggataagaattgggctgagtgaatggacagctggcatgtgggggatgggcagatggagtggatatacacttgcacatttatgggtgtgagtggtaggagtccatagaaagttcaggaatagaggtacacagctcctctggaaagacttacccagtgttcttctgccttgttcaccctgagccatatgagcagttcagtcttgcttatcctcagtaagtctccttcctcccaccctgcatcaaaccagagctattatccaaggacaatagggttctgtggtgtttctcattctgcagcagagaagcaaagctgacaacatggtatttatatcacactctggctttccagaggcctcacatccactaatgaattaattcttcctaacaacagtgcctttattagggtggcatcgcactgtgttcatcagacaagggcactgaagcagtggctgaaactgctcctgatgcgtgagatgcccagctgtggccactacggggtcatatgaggcgtgttgtgtggatacagaaaatgggacaaggaacttggatctggatgtgagcaaagcctgtggttactccttgggaagatgaatttgtgtttagagtctccattttcctcatctgtaaaactaggagagcaagaaactagacaacatgtggattctttgtgaagatttggaaacacatgggggggattttgtgagccgtgacacatgcacaggaatactgtggctgagggtgcaggagggtgctgcattgtatggagggtgaagttcagagaacagagtaagaaccctcaaaatttcctggaagattaacatctataaacttctctgactctaggccattcagattctctttccctaacgtctaagctctacagaatctatctgttctccagcaccaattaactcctgatgctctttactctcatatgctggctttcatgttccattcatctgtctgtccatccatccatccatccatccatccatccatccattcacccatccacccacccatccatctattcatccatctatacatacatacatttaactttatttttgtgtatgtggaaaatattttattttactaagaatgggaattatcattgatgagtgataaagatttcaatgtgttgatctgtagagcttggcccacaggttctgaatcttggattccacactctctactcccaatgtttgaaatgcatttgtgtcagcttgtgatggtcaatccttattgttaacttgactggagacccacctctgaatgcttttgtgaatgtgttgctagagatacttactggaggcaggaagaccttcactgagtgtggttgccatcgccaagtgggtggggttctcaagtgaatagaaagggggaaagaaagccaaattaactccaccagtcatcctgttctacttcctgactgcagatagaatgtgaccagcttcctcatgcttctcctgctacaaccagtgtccctaggaccaccatgccttccctgccatgatggactgcattctcaatccgagaatcaaagtcatcccttaaaatggctcttgttaggtgttttgtcaaggcaagagagaagtacttaagctttttctcatgactggtggctcaaccatagctcctcttctaacatcaaatctttacataagaagctccttatatcctctttgtacctagcgcccatggttatggtcattgtaataaaatatgcaaacacaactatgaccttcttgactatttctctatgtatagcttaatggcatagagaacattcataatgaggtatagtcactggcaacaaccattccacaactctcttcacttaacttcaaatctctgccaaccaccgtttctcctaactatggtttttcactattctaggtacctcatgtcagtggaactgtggagtccttcctttctgaaactagcttgtttaacttagcataatgccttcaaggttaacctgtgttactgtgtattttagaattcccatcccttttaagctcattgaatatatgggttacatcttgctttccattcatctctctgatgacacccaaggttgcttccagtttagttattgtagataattcttttgtgaatgtaggtatgttcagggattactttttactccaaatggatagctttgtctgatggatatctgtggcagctgatcacagtgcttctctgtgataggcactgttaaggcagaaatgactacagttgcaattgttaagcaaccatgtgtgtatgacagatacttccataatgcctggggagaagggagaaaggcaaaggagcaggattccagctcagatttctccgtcccgagctacttgcttacctgttttgtgtcttatttttgttacttacaaaagtaggattgcgttttcaatttcatctgctcattgcctatctgttgcatgtacagttcaatgagaggagagagtgaatgtatttcatcaaacaaaaggcattaaactactgacagttgtcattcccccaagggcctgacatgtaacacatgccaacagatgctgtttgaattcatgagtgtttgcttaaatctgcaagtagcagactttgtttttagttctggttctcttggcctcagactggctttgttgtggatcctgctttgtagggatgggcctattgtgccagccctgttaaaacaaataagtatacacagctccctgtgagaatgcatgacccgagagaacaatcgtgttgatgttcaaatgaaataggcctctcaggaaagtaaaggcaagatagtagtagtcacaaagagtttgggaaaattggagtccaaagacaactccaaggaacatagatatgttatataacccagggacctccctggttcaagtataaccagtacttagtacaacaatatgtactaagaaggcacttctcaagtttcaatgagcataagaatgattggtgttcctgtgaaataagagctatggttctatagaaatggagcgggggagggggggaatccctgacatagtcttcatttctattaaccccttttggtgatatgattgcattcaatccaccaaccacataatgatcagcaagagcctatcttctgtgcaaggctcattcgagagcttgaacccgggagatcccttggttatataacgtatctatggtattctgagctcctgtgtaagggagaataggcttcctgttcttgtattcatgtaattctccataatggcaccctaggaactaggtctcaggcaaggagaccaggtttgttgttgttgttgttttgtttgtttgtttgtttttgtttttcgagacaaggtttctctgtgtagccctggctgtcccagaactcactctgtagaccaggctggcctcgaactcagaaatctgcctgcctctaaggagaccagttttaatgtttgtcttcatgttggtctctgaaaggtttggccatttaagtcaattgcttacatgcttttccagaagcgtcctttgctcctagttctgaagcatacttggataagacagtgatatctttgtgaaaattgaggctaaggatcgatggctggagatggcgtattagcttagctctgagaactactcatccagccctttaccttcctattgagactgagaagtgagtaaattaacacccatggggcctggcgggatctgaagacccacaccttctctcattcgggagttgatgagaaaaagatagcttaggaggtcaatttcataaggttgtgtcctgcctccaagcatggacaaagagctccccacaacaggctgtgttctagggggtcagtagtcctggtttaaggtaccgagtgaccagagagatgctgttcaggtttagttttgaccaattggtccagccttactgactgcagggcagctataatggggttctttttaatttttgttttttcattccttttaactttactgcctactcataattagattcttaagggactccttgagaatatttatatatttataatatgtaaatatatttatataattatatttaaatatatatttctaatttatattataattaaaagtagaaatatagaaatatatctataattagatttttaaaggaccttatccagatttgtatccagtatatttctatttgcatagcacttagttcccaccttaaaatcccactagtgggcctatatttctgtgatgcagagagatggagatggagagatagataaatgtggagatggagagataaatagattagatagatagatagatagctagataactcccttctggtttcctctctttaccatttagctggctagatgtcataaggcctacaactcttatgatgctagttttcactctctcatggcaaccctctcaactaggtttcatcccagatcctgaatgagttgccttctcagcacccagcaaacttcagaatggatgagaggttcctgtcacgttccatcagccatgccaatgcagccatggcagttaggggaactatgcaactcaatgttttctggatagaataggtagtcttggtcaaagatggtccacacagtaagtagagtgtcctaggagagaacgaagagtagggcatttgcttcagtcctttctttccatcttggcacctcctttccttctaacaggctcattttgaacagctgctgacctttgaaggggtcatcatgaacaataggcttggtggctttaagaaagagacagtatcctttacccaggacttttctccaaatgagtcaggaggagggtcatgctctacagaagcagattctatagataggaagtaggagaaggcacagggagaagaaggttttggtacgtggcacaggaagcacaggagggggtcataagcagaaaggaagctgggtttttcttttctttcttaatgtatcttaatttgaatttttctgtagttaccttggtatttaaatactttcatttctttggggcatctgtaaagcttcagtgttcataaataatggagggatagagacttggctggctgttaggaacatggaagtatttatcaatcaggatggattggattacttgggactcaagaaacccaacttagaaggagaggacctcttttaacagactctattgttttaaattctccttccccattgacaccactcacactggtgcaggacagtagtgcacacatcagtgccacatttgattagattctaaagagaaaggaaggaccaggggatctttcctgccttttcctctcccaggaatgcccatgtgagctgaccctatatgatcaggagaaataaaaaagaagtatgcgctgttcctgggataatactatctctgttttaagaactaaaagttagaatcactgagtatttatgagcattaaaggattcaaataaaccagatttcctctctcaagagtaatcatatggctcttccaaccggcgcccaacatcagtaacccagatgagtatcagaattaaacagaccccacgtattaacagggtgaaagaaaaaaggcaaaatattttaaatgtgtgggctcttaacagatgacattgtttaaaagaccaggaagagaagaggcggaagaagaatgggagagagatattaaccggaacattgttgacacttggccatcagctcctgcaggaagtcccaattaggcccacgtctgcctgatgccatcttcaacacgaacatcatatccgctgtaagctcctaactgcttacacacacttgggcattcatctcagtttccttatgtttcagtatctttttatgcccatcctttaggatcttatttgtacctataaatatgtagacaagggggaagggaggagacactggtttcctggcatttgttgtatctgaagttcttatagccttagtagctgggtattctgaatggaagagtctagaatgtgggttgagaatgattacatagtatttgctctaatgctctatgcttcagtgtcttggccagcatgtgtggagagataagcaagaaatgtcatctttgtgcatctgctaagagaagttttgaggtttaacatttaccacaatcttcaggttccctatacacacattctatgcatcttccctctaacttaccctccactctgtacccagaatgagtttctgtaaacacaagtcagatcatgtcattgccctgttttcgtgcacctccaagcttcctattgcgttttgcataaaatgcaaactcccttcagtggccttctgagcttagcatgaccatgtcatacccctgtgtcttagcatccacccactctctagcccctatccccacccctggtatggactgtgctccagcttcattggctgtttctgttatcagggctccccaagatagctcttctgtttgttttacatgatgctttctttgcttggaagctacccacccccaatgatgctttaactacttggaatgttctcctccacacacacacacactacccactactttggatagtcatgtggctgatgaagctcccaggctgcttcttctctcccctcccccacatgcactatactatcttgctagtatcttgtatcttgttggttttctctgtcctactgatctctccttggatctttctttctttctttctttctttctttctttctttctttctttctttctttctttctctttctctctctctctctctctctctctctctctctttctttctttctttctttctctctctctttttaaattaatgtttctacttgtttgttgtgacagggtttgattatgtagcccaggcattggactcattttgtagatataatattatgattcatttttatttgtgattaaaaagacagataagcaatttatatatttgctggactaacttatcttagattcatggcacagaatgggctgtgcctctttttaactatgtcacttgccatattttttcatatctctgtactttggtcactccgtatgtataatggaggtattttattagctaacgtccacattttgccattagcattgagtatagaaatatatataaaacctttgatcagtgtcttaccttggtaaagccctgaatagtgttgactgccattattattattattattattattattattattattattattattttgataattcttacaaacagatgcatcttctaagagacatttagatgtagatattatacaatgagtggactctagccagcccaggcctggaaaacatggcagcctttgctcttctcccttattctctctaccttggtaaaaaccattagattacattcctaaacctagcccctaggtccatttccttatttggctaatgtctcctcctaaggataactaccaaggtctagctatcaaattattgaagtctagcaatcaaaaatctcctttggctcacctaactaacatgcccaattaaaattgaacacctcatcttaccacagagtttccatttttacttttctaaactgccatttgcctatgggccacatctatctcctctctatttctgaggcagtcctttgtcccccagctccaggacaaatgcccctgccccctctcccttgcccattttccgcctctcttttgttcccctccctctctcccttttcctctatctcctgtctttgtcccttatccctgtcctatgtccctcctggacaaataaacctttgtactgagaactggtcttagagtatcttgagccagactgcaaggtctctacacataggtgatatctgataccctttctctctttcttcccttttcaaatcattagggactttgaagggagagtttctctgttacatttgactttgaaagacagtagaataggcagtcattgtgtacaaaggggcatgaactttaaaggcagagaaagaaatgggatgagttactcactagattatggttcacacacacacactatgggctaattggctaaattggaatggatgactatggaagaagaatgacatcacagcagagcctgatacaaggtgtagaccctctgctactcttgcatcaaagaacttgtgggtttattactattgtcataaatagtttcaattcattttctggtcatggttacttctttcccagccagtgtgtctggtattctccacaccagcatcctgctgggcacagaccctagcccaacaaagaacagtggctggctatctaaagctagagaaagagcattccagaaagtttcttggaaaccacatcacctaaagatgttcatttaccgatgagaaaactacaaccaaggaagaaacctttatttattcagtaattcagtaatgatttattgagccagtttgctgtgcaaggccctaagctagggaagaaaatcaaaaggagccatccactctttcagagtgaagcatccacaattaactcttataaaagagtacttaatagatgcaatatgtaaagaagagatgggacctgagaattataagctttgagttccaatctaaattccatcaccctttaaaaaaaaaatctaacccagaggaattgactgagtcttggctctttcatgtgtaaaatgcggaagatggtgtgtggattgtgaatctctcacaaggaatttatgagcacgcagataatcctgacacatgctgatgcttgatggcctataaagcaatttgtagacgatgcttttgttactggtaggatgataatttgcaaacagggaattgtggctgcagggataatataatgtgaaaatggaagggatggctgtggagatggaaggaggcctatgcagtggagaccgggtagagcagagcaaaggctgagccccagacctccattcccaggaggggtttttactgttcagaataaatgcgaagggacttttctctgtgaggagtgattcagtcaggtggcaactaccacataatggtttctgagcaagtctggtgggaaaggagaggaaggaaggtgctgaggctcaggcaaagctgggatgtgaaggccactgagggttctactactccctcagctgatgacagaaaggtcacttaaggttgagtagacaaaatgaaaatggtgtatttgtgttctactactaaaacaagatagttgaggctgggtaaccttataaagaaaaatatgtttatttagactatatttctggtgtttcaagggtgagatgcttgcttcagtttagccccactgagggtcttttggttgatgatgttagaaaatggagcataatcagagagaacatcacaaggcaagaagctaaagaagcagagaaagggtcgggtgtgtgcctctgaaacagttttcttagaactctcctgaaattattcttttgtggcctcaggatttccctgcctctatccagcatcccttccctggtgactaaggttccaaatcatgaacctttgaggagcagacaacctatgactgaagaagacacagatatggctaatttgaggaacaaagtatggtttaaagtgaggcctgaagtctatgggggcataatttagaggaactatttttccaggaagacccgagctaagcctggagattggagattatgtgtgtgtgtgtccctgtccatctatatctctcattctgactctctttctttctctgtctctctgtttctctgtctctctgtttctctctctctctctctctctctccctctctctctctttctctctctctctctctttctctctctctgtgtatgtgtgtgtgtatgtctgtgtgagagagaggatagcttggtgacccaagattaaaattatttgattacaaatataatttagattcagagatatcctccttccccttgaagttgcccctacaaccacacaaggccttgtgaaatatgtggccaattctgcaagggagattatcagggtgcaattgctgagagcagtcaccatccagggtagcatgtgaagaatgggcacactgcagatgggactatttggatgagcatcttcccagggagcaaaacagccacaccccagggtgccttggctcattggtaccctgcactgtcgtccaattctccatcacaggatctctcttcccacttcacagacttaatggcatcttaaggcagggggcatttcttccccgaggaggaatagatgggattttctcagaagacatgcatctattaagctcctgtggtttgtagaatcagccctgtggatggtgacagctgggagggtgacataagcaatgctttgtggcacttctcaaaagttgctgttcatgaaactcagattgagcgtgtccaaacctgaaatgttaacttcttccttgggattatcttccttgggccttcctcagtgccttcttcaggcaaaagccacctcgtggttgtcccagttattgcctgctcattgtcctcaaggctttcccgatctaaccaccacctgccccctttgcttcccctgaagctacattgctgctgccttagatctaggtcctccatgcctaacacccaatcaacaggaggagccaggctcactccaccttgcttgttccctcatacccaccccccccacacacacactctggtgaaatctcttccattgctttgcaggattctaaactgccagcattgtcggtgtctgtgcactgggacaccatgaaattgtctctgaatggctcctctgtggtaggcactgaaggttctggctggagagggggcattctgatcaaggtacgcacagcctaatggagaggtggccataggaagagtctatgttcagtgggacatagatagtgaagggcagccttgactgggggtgagactgtaggcttattgtgttcccttagatcattttctccagctagcaaaaataccagggactgatttgggaagagatgagaagaatgttcatattgagaaaagctaaatagtccttcactaggaccaacctctatttacccactgatgacacttactgtcctcactaatagatttacttcaatcttaaactttaaaaaaaaatatatacttgactacgtcacttttgcagactatcttatttttttttcctaacaggatgcaaacatttaaatttaaaaagcatttttcttattccttgttgtagggggaatgcatagctatttctaaaagtttcatatgataagaactacatgcaaatagatcttatgtgttgcctaaggatcttgtttgacagtacttagatacatgtcctttccgagtttcatgtatccacacacacattaatgtaaatgagggtgatgacatcaatcattctgtatgataccatatatggaatattataaatcattaaaactcatttttatacacttccttgtatgttggggatctctctctctctctctctctctctctctctctctctgtgtgtgtatatgtgtgtgtgtgtgtgtgtgtgtgtgtgcacgcgcacacatgtacattctggtcctctgatttccttgctattaagccccagaagatttgctctgacaaaggttgcaaacagttatagttctggtccatatgtttcatagcagaattataagttaatttctagtgaccttcacccaagcagtcttaatcctccccaccgaaacacaccctctgtgacaggtacttggcttgccatgatcatccttgaatacatggcaaaaatgtggctgtgcagatgtaactaggagcctaacacttggctttaagtttgtcaaaggggaaactggtttagatgagtcttagtaattaaccagggaagccctttaagagagagtctggaagcctgagcccttcttttccactagcgtaaagaaggtgtccacccaagatctgcagttacaagcagatgaagcctgccgatggcgtgtgagcttggaaggagactgagctacagatgaggtccaagtcctggctggcatttctgtgtagcttataaagtcctgagcatagaacccctgaaactttgagacactgtatgttgttttaatctgtggtgactgtggtgacttactatgaagcaatagaatacaatatatgaaacctgcctttaataaatcatgcatgatttacacttccaacttctaagccagcccaaggtctgcataatttctttgccaatgctagatgttgctaagatttaagtgcttgagaatctaaaaacgcaaaataatacttttaagcctgtaattaagccacagctagaattgtgtgctttctgtattttaattaaaaaatatttactgtatgtgcttggctattttgcccccgtgtatgtctctgtactacatgcatgcctgtgcccatagaagcaagaagaagatgttggaacttctgggactggagttgcgaacagaagtaaggcaccatgtgggtgttggaagtctaatctgggtcctctggaagagcagtcagttctcttaactgttgaaccatctccctagctccacattgtattttagttgaaaactatgttgactcatcagcacatcgtgtgtccctttgcttgttccatctttctcatactgatttgtcccaagcatctttgtttcctctgtgggacatgatggtggttcgtgttgttgtttgttttccctaataccgtttatggtatttagtgatcagagacatggatgctctgtgaactttcaaagtgccattctggcagtctgtatggaagtgtgtttgatggacattaaggagagccatgctagtagaatcacatttgcagagataagataatgacagtgggagctggggtacattaaggatggcagagatggtaagataggaactcagaaatgtcactggcaggctttggaattcttcagacaaggttctttaccagctctggcatggtggtgatggaatagaataataaagtattttctggcttaggctggtaagtaacaaattcactgaggaccctccttctcatagatgtgggccaacagagactgtgggcttttcacatcccacagagatcagaaagcacatatctgttacactcacagcccttcctttatttcccgcggatggatgaattaactcttcccagagatgcccttcctcccttctaatagacagagcctttgcttatattgtagtacctcagcagacaaaactgtggctttgaaactgagcagattggtgggatgcggtgtttgtcaaacaagcatctacttagacatccctgacacagtgcagatcacccttcaagcagccggaggagccttgtctgtggacaggggcaggcgtgggttggatgaggacacattcttctttgaaatgaacaaatcttagtgagatgttaaacatcctattaagctatctgaaaggaggaaagaaggcaacttgttctggtcctagatgatggacaggtcctcaaaccatctaaaaggacgctgcactacccacagtgtgtagttgcataaataaatgatctgctgggcaggcgccattttgatgtcttctcatgggacatttaatcatatttggatacttgtttgattgtttagcatctggtgtgggtagaggccatggatgctcctaagcatgttaaaatgtacaaggcaggcaggccccagttgcagaaccatgtgccaccaaatgttaaccctgatgagactgagaacccctggtctggcaggaactgtgtactgtgggggctggagagatggctcagaggttaagagcgtttgctgctcttctggaagacccatatttgggtccagcattcatctcaggcagctccagggaatccgatggcctctgtgcccactgcactcttgtacacatgtacacacagagatacacacacattcacttaaatagtgataaaaatcttttaaaggagtgctgcaaatcaatgatatgtcctggttggagttataggaaattatttctaagcactgtaacatgtcctgtgaataactagcctcccagaatctcttctttccctattgtctctgctgagtaccattttgagtccttaatgatgggaacccaggaaggattcagcactgtagggtatgaatctctcaattcatctgcagagttctggccataaacaaccctgaatgccctgtatttgaaagggcttaaacacacacacacacacacacacacacacacacacacacacacacacacacaaaacacatctatctctgaagtagaaagctatttcctcaaaccccaaattaaacattgctaaacagtcactgccatttggcaaggttccaatatcatatccaacacaccaaacaccaacttcatcttggattctgataatgtatttgcccagtccagatagaaactctgtctggtgagagaggttcagctgtggaaatagacaagaggctgtatatttgaaattatgagagtggataaatatttgatgtgtagtaactaaagctggacattgcatatgtgtgggtcagaagagactatgaggattattggtgccagaaatggaagaaggtaaagctggagtaaattaacattaaatgccatctatatatctccagcataatgttatttttataggtaatggagatatatgtttactatataaagatatccagaggtttttctgtttgttggtttgtttccagattggctccaaatagcaaggttttcttttcttctctttttaatgtttgttgatggtggcagtattcttttcggtcccaggagagatacagaaaaacaaacattacagaaaataagtattggccttaaattgtcagtcataaagaatcccgatgcctatgttctgtttccatgaaccaattttatagaaagagatgttttttcgtgtcttgagtctgtttctcagaaatagtctctgtgggacgggatctggattgacagcagcaaatgggatttgcatggaggcagcatctccctccaacaattccacagagggttcgcagccctcatcattcttaatcccccttggcaggaactttcaccccctcgtcctgtcctgccttttgcttccctccctcagtgtctgtctccagccctggctatcttgatttttgccacatttgcaggttctcgtccctacactcagttcttcccctgtgctctctcttacagaaatttcattgactcccaaggtcttaagcacggactctacagacaattctgaaattctcatctttagcttcagtcagccatagatttggtggccactgagatgaaaattcaggaagttatctctttccaatgggtctacttctaacatgggagcacctctgaatgggtaaaactcacaaagtgctattttgatatgtctttctcccttagattagggaacaatctcagggtcacttaaaatgaatctattccttgtattaggacccttcctgcaaacagaagttggcatctctgtggccttccttctctgtgttgtcactattaccccactacatcacatgcttctgttttctatgctcctctaaggttgtctatatatgtgaaatcatgaaatcctcaccttccgctaaccctggctttaatggctagatcattaatattgccattctgtgagatgtcacccagcaacttctatgacgatgctcactagtccccataatgccacagtcttaactgcaatgcttgcttctgcacctggtccagctgtaaagaagaaagagtgggatgaggtgctaaagggagacatggaagactggtggggagaactgctctgtgaaggaggtggagccctctccatagactttgagactttgaagcctgggggctgttagaggtcacctgaccactagaatatagagttctggcaattgcagcatctagtggtgagtgaggggggagctttggggtactctgctctttgggggtattttgacattgtgtgatccttagtacacctgtgcaggacactgagctgtaaaagttcatcctgaacattagtttggacctctcctcctagctgcatgcatctgctgccaggcatgactagactgatggatcagccgctgcttctcacacataggggatttgctggctggttttgtaactatgagaaaagaataaacaaagttggagatagtctgtgtgatcattttcattcacagagataatgaaacttactaaaagttatcctgctgtctactaagaggagagaccgtcccttagcatggcaggagctaatggcataggcagaggaagttttctatcacagatcaagctgacaggccagagtcctaaactggagctttgtgtggaccataccaatagcaaatgaattccagggtgcggggacaacactctccgggtgggccgccctatgtagtaaaagcatgacacactaatgactcctcgttttcccttcttctaatagtctttatcctatgaaggtctacctcttctcctgattaagggagggctgaggaagcaaagcttaatgtgaaacatctatccctcagccggaaccctgggttcagagcccttaagccaacatcttaaataatagctcggtgttcctcaataggccctagtggaccccaggatgccttagtgtgctccagtgcacgtcagtataccccaatgtactccaatatgctcttggtgcactctctctctctctctctctctgtaatcatgtgatatgggttccactttttgttcattcctgcagtattccttaaaaataggaaacaaagaatgatggaagatgccttctttgctgggaaggaagaaaaagtagcctaggtgtctgtcaggatggaatccctagcaaagtgaccatctaggttattacagtggatgccaaagagcctgcgtaaaaggcttgtgtttgtcctgtacccgtgctcgccttacaacatgcattatgtactattctcatttcagcaaaaactttccttgttgttttctctgttgccagagagaaaaactgagacttatcaagatgttggttctaacttcaagagacctgagtctagggtcgtgagcagatcaagaaacctttagaactttgccacactctccccctgcttttggattacctggccagtgcatgccacttcagtggctttgcctggcatccttagtaactcccaataacaaatgatcctgaacaaagtgattttattatattttatttttaagggaaggaatgagaagaagcagacaacacagctgatgtgtgtgagcccccagaccctatttgttaaactctcggctcatctaaccaaccattttcccagtaatggttgactctataaacttcaagctgtctgctctaatctgatgcatctaatgtatccttagtgaacatcagttgggcgtggtagtgtacacctgttttctctgaactcaggaggtgggtttcaatacaagaggatgacaactgcaagaccagcctgagttgtatgtgagatcctatctcaaaataaatctctgtgtgtgcagctttgtgactattgcaggggttggagaagagaagccacggtttcgcagactgccattttatatacctatctccatgacatgggtctttatagcttaatgaacatgctccctttatctccatgtctcctttttgttttgacattacatgacattttcaggcagtcatatttattgaaccttttcttagagctcctggatttttgaataaaaacctataaagccttaagacactcccttggctatgaagaaatttattttctctctctttctcttgtcccgtaggattttaatgaattattcttttgcatttgtattttggtctgtttgtggtttgccttgggattcagtatgaaactgatgcaactctaaaaggttcctctgtgggatgcccctgtgagaactgtgccaaacccatgtttactgggttcggattctgaactttcagatgttctaatggccagttcttctgttgatacattagtccattgttaaggcttcaatggctaagatagtaatatgatgagctttagagtgtattttgaaagcaagacagggtttctaatttctagtaatttttttcctatcttttctcattactttgttttccccaagccttatgatgagataagccatgtctcctccatcttctggatacacacctcgtctcaagatcacattacaaagtcgctcccttggggaggcttccttgatgatctcaggtttttgtatggttctccccaaccccgattcatttccagagaataccctgcaccaccttggcacttgtgcaaatggagcaggcctgtgactgtgtacctatctacatcccagtgacctgtgaccacttcaagagtaggggtaaggcctcatccactcttctatctgtctagagttagctaatgcctgacagatagcaggtgctttctccgatttcagttgcatcacaaaccacctgaactctaatagccacagtgtgattgaatccagctaaatggccttgttgttggatccctccacttccaccccagccatgtggttgcatcagatagtagctgatgctgtaatcatgcatgagtttcccacactcacaagtcaggtgggtgatgctggctgtctctgggacctcagctgggcctgttggctgaagcccctgtcatgtggcctgcatttcaatgacatgatggccgcctccaaaagctggggaatctggtggaagctatgtcatcttttgtgacaaagtctcagaactgtcacataaaggcacagctgccatgttctgtgggctgagaaagccacagaggcctgcctaagttcaagagagggagacataaattcagtctcttgatgggcagtgacaaagtcatggtggaataagtggtatacatgtgtccattatcagaatgtataattcaataatctaaacagggggattatgagttcattcagtcttcatagcccatcccatcataatcatatcatatcatgtcaatcatatatcatatcttgtcttcccatcctactgttataccagtgcactgtaggtggctgtcaaatgggtcaaatggacagtttaaatcaccaggatggttacactgtgagcctcagtttaacctcaaacctctgactaaggagatggagcgttgtcaggaatgttttttttctctgcctcctcaggctggaggtgaagccaagttgctgagttcctggggagagttttctgactgcatcacatgcagttccaggagtcacaggggatgcattcagcatttgtggcactgctctttgctggttgatcataaagttttcctcttccattcaaggtgctgagttattggagtatttttttttccttctctactttctgagtaagtgctttggagaagatggatgcacgggaagtgacatattaagtatttctgctgaaatgtggggtttctgctcgaatggaaggtgccgtgtttatgactggcacacaaattgaagaatggaactggctttttgcacaatcaagtttatagcttttgctctcagaggtggttctcactcatggtgagagctgaaggggcttgggggaagctgcctgctttgatcctgacagataaagtaagcagggcagtgtggggaaaccaccgaagattgactgagatagttctcctatggctgggacgacctccctcattgttgaccagtctcatgggtgggaaggcacccgatggtaaggatggtggggcttgctactgcttgggtcttggggccaaaatttatctctttgccacagcttgagtctcggtgtcagaatttaactgtctggtaggtttatgtcctaggagatgacctatttttagggaggtctttgttgggatagcctttagtaaatagcaagtatacagcccctaaatccagaggttgtaaacccaaactctactcttctttcataccaacacattacctcacttctttgtgacccaggggttccatttcaatcctgggccacattttagaagttgcagagcatttgaatcgagttaaaacaggggactctcaatccatgttagctactgtagtcattgtttctgatattgctatttaagtgtcaccattaatcatgagctgttcgatgctctccctagaccctacctgtacggcttcacattaatcatataatttaaaaattttcagtagcaatattcttttttttaaaaaaagaaacattttagcaatgtcctttatttaactaatatatgcaaatattttttatttaatcagcataaaaatattactggtaagctgggtcaggtggaaacaggcctgtaatgccagctgcttgggaggctggggaaggaggaccatagtcttaaggatggcctgggctatgtagtaaggccatgtcttaaatttccaaatcagtaaaaacagcgatggagctaatgttcagtggttaaatatgtgcctagcctgcatgaggctgtaaatgcagttcctaattctccccattatcatcaatgagataccttatattctacttcataccaagcttttgtcctaggaaacctgtgcactgcttccagcatctctcaaacgcagtagccatacttcatccgctcaatagtgtcatatgtctggtcactgtcatactggggagcacagctctggtggcttgttgttagtccatgaatttaggtaaggcagacagggtgcctacttgcaggcagggtattgctccttactgagttctgtgagctggctactttatattgccatatgatttaattcattttttatgaagcaaagttgaattttattaagaggaggatttaacacagatttaagcacaaatataaagtgcaagagtgctactgacgaagaggacattcaagagatggggatggcttcttaagagagagtcatatttgagtatattaacaatagccacatatggtaattcttatggctattttaccagcaagaattttatgccaactttatagcttcacttgttaaaagttgaagaactaatttttccacagttgcccagctttaaaagacagaatttgaactcgggtctctgagatcaagacttccttatggtaacctggtaactggatgatcagttttactggcataacaatgcaaatctgtctagtgctaattcaggcctcatacacagtatctgccctgtgttccaagactcctgtgtggtcatgtttgaggacagctagatcaggaccaggcgaaggactgaccctgtgtccagggtgaggatacaggataaatctgtctgtggccagtgttgtgacctagtgagaacttaggacctgactctattcattctatccaaggatcagagttgatcctgggtctaggctgtggccaagttaaactttggactgagactgaggtcagggctcggcttcaagtcaagctcagaacttattttaagccccaaagccagagcagtgggcacagctagttcacagagagctcattgttttatgtccattctaacaatctgagcccataccagtcagtgctgttataaagccagggcattgtcgttcccctgtcttggttactctgcagtgtcccatgcaaatggacattggtaaacttagctgtagtaaggcctacaatcccacaggaatagcagcttccctggggaatgttaaagagatacaatggtcagacacctctgctacttttcactctggatgggaccaggccttatgaaactaattttggtgttcatgctgcatgtgaccctggaaaggagttcagatctcaagggacacaattgtccagagagtcagttgggggcatttagtgacccaaggtcacatgcctctctccctgagtcctgacctgagtctcctggagttgccagatcaggctgagacggttacagttgtgagacttagctatagaccagacagtgaatctcagagaccacttctgtcagagggaagggaaacaataaccctggccatccacacagctagggttccgcactggaaatgaatgaggcgccatttctaaataaatcattcatagaaaagcaaggtagaaatggtgcgggcagtattttctcctaagtataagaaagaagagaaatgaaaacacgaggagaatgttgagtgatgtagggagatgctcacagaggctggaggcaggcagagtactctcaacagcaagcacagctttcaaaggtgggccaaggaggatgaacaccatcaggtcttcgattaacttcagccattcctaggattcagggtcctgtgactcccctttctgtgtccagcttcatgtacagggatctggttctcctttgagcataggagtgtaaaaggagggcttaaacagggaggttgcttaaagggttacaacctcctaagcgtgattgtctagtagtctcaactctgcagtgggggtagaaagaagctttatgcacccattccttgttagtttcagccaatataaaaacaggttgtaagaatccaacatgatgaatctgagcatccctaggcctttgaaaggatcatgtcacgcagtgacagataggctgttctgattctaacattaagtatccaggctcatgtgtgtgaacacttggaccctgctgttggccctttttaggagtttgcacatcctttggaaatctggacctagctggcagacataggacatgtcaaacaaaagaagcacctgttcctagttacagcccgtccctgtattcctgccagcttcatatttttgctaccatgccttccctgctacgacagactgtgtatctctttaaaccacaggcaaaaacaatcccccttttctttaatttgtaatgcacagtattttgtcatcacaagaaggagagtaataagtgcagataggtttgaggaatgtgtcattaggcaatgtcgttgtgtgagcattgcatgaacttctgtacttctagataggtagtctgctgcaggtctaggcagtatggcatatattgtgcagtctattaataattgaattataattatgcagcatacaacaatactccctttggggtaaaagagttttgtgtgtcttgttgtagctgccagaattttgaagcaaattccaaaaagtgtttatgcatttgcaatgcaattttggagcatcgatgtgtgtacttgacagcaacactgaatgcatatttaatttggatgtgtaagcaatcactggtaatccttttatgtttcatctttatagttttatgtataattgtttttccatgtatgcgccatgaaaagtattaaacaatttaacagtaatgacagtagaattgaaccaaatattgatgccagcaaacactgtatatgtgtgtgctttatgtgcacggatacaatgtcatgtgtgtatgtatatataaatatgtttatacatataacaacagtatcttgccatgttgaaaatataatttgaacttgctatgaaaaggataaattattgaataagctatgttggaacttttggcaactattggtgaaaaataattatattcttgcctcactctcaactctatattgtaccctcttgttactgttattttttatttaaacaatttttattacatattttcttcatttacaattcaaatgtcccttacatccaaaatctcttataccctccccccaccctgctctccaacccacccactcctgcttcctggctctggtattcctctgtattggggtatataatctttgcaagaccaagggcctctcctcccaatgatggccgattaggccatcttctgctacatatgcagctagagacacagctctgaggggtaccggttagttcatattgttgttcctcctataaataacaaaaaacaaacctagatttgtaacacattcctaagatcccagaactcaggaggctgaggcaggaaaattggttgaagctacccaggactttacagcaataccttgtctaaaactataaaaataataatagtgataaaataaaacatattgaaattgaaaacataaagcaagttgaatgatctataggtaatacacacagacacagacacacagacacacacacacatatgaatgagatcttgtataagaaataactaatctcctagatctgtttcttaatttcttccttcatattatgagtttctaccatatagggcacccatggagattaagtaatgtatataaattcttcagaaaagtacactgcctgaagaaattatatataaatattaactactatttaaaacatgtattaagtagagtagctaaaataaaatgatatattggactacataaaatgttagagtatctgcatatcaagacataaaatacatgaaacagagtgcaaattgcacactaaaaatttatcctgggtgacagaaaattggagtcccttcaagtcaacaaggaaaataagatgcatgaagataagagtcactttctgaagataagagaaaaatcaaacttgctcatctatccctcctacagatacccagctcacacctgttatgtattggactctctttgggacgatgactagcaatgatcagagttctgtccctgtgtacaagaaacctacatcttattggacagaaaaacataaaagcaagaaacctagcatgtgaagagctacagaaatttcaattctgacaatgactaaccacgtttatcaatgttcccacatagcaaatatttttgagtgaattttatcacatattctggatgacgcagggaaattaacacgctcacacatttgtaatgggagaaacagccgctgaaacctgaccgttgggaattttgtgctatatgtgctaacagatcttgcgatgtgtgattcctacattgtgacaacttgatgtataggaagatacatataggattggtcaaaacacacagaaagattccaggcaagagagataacagaaacaattattgctttaaaaagtattgcgatgatatctacctctttctatgctgacaaacatataaacatgaacatatgagtggatagattcatttaattcccaatatttattgtttatttttaaccccaaggtactgcttccattcagggatatagcagtgataaatgaaagcagtgtttcaattcttggggtgtccttttatttatgggaagaatacaaagtctaaattgacagaaagcacacaaaaagtgtgcacatgcatatatattcatatgcaacttgtgaacagtcagaaaaattataaaaaatttatgaggaaaaccaaggcttatttcccttctcctgtgtctttgtgaatagggtggagacaaagaacctatgtattagttaaggggtcagaggtaatatctctgattgatgcttatgcataggcccatgcgaagccaggcccatgccatgctgacctttcatggaggtgcatcctcaaaatagcatgaaagggctaatcacatagattatagagagttgtgggccacttggaagattgttatggtattgggaaattctggtcaatgctgagtaatagctattaaaattatttgtgggtcaagaatgtagctatagctctgcttggagactctttgtcattgactgttgtggtttgaatgaaaatggcccccacaggctcacaggaagtggcaatattgggaggtgtggccttgttggagtaggagtgatcttgttggaggacatgtgtcactgggggatgggctttggggtttcaaaagctcaagccaggcccagtgtcactctctcttcctgctgcctgccaatgtgaatgtagaactcttaagctatctctccaacatcatgtctgcctgcgtgccactgtgctttcagccataaaagctatagacaaaacatgaactgtaagccagccacagttaaaaccttttcttttatacatattgctgtggctaaaaaatctcttcacagcaataaaaacctaactacgacattgaccaactggtcatttggtggaagattgagctgatttttagagtctaaggtgaatcctgggttgagccggcaggagggctatgctccggtggctagtcagctggatgactgccatgtctagtataatgccttctagaacagctcaagtgtagagtggacttgcaagctccactggaagccttatccagtctatcataggaaaggagaggggaaagaaactaagggcttaccagattttggtaatttaagactatagcttcatagataaaataaaaatcagcagagaaaatgactctgctgtacaaatttatataacatgtgttaactaataacttttttattagagaatggtatgtagatgaggtaaggtagataatacagtgtgtgtgtgtgtgtgtgtgtgtgtgtgtccacatatacattttaaagctcatgacagtgaaagtcagtgtccacacattacttgagcactgtgtgttggcagcccctgtcagtagtgaatgtagagctgcctgtttctctttatggccattggacagaaatatcctaaacaaggtgtcctgcaagtgaccctttacattctctgacatatccagggttgaagtgggaagcagacatttgaacaaatgattctaagcaggcctgttgctacactaagtttcctagttaagtcttttgatcttactaaacgttctcccccaggctctgtttagagactgtaagcctctaaggatgttcctgttgtcaggatgatccggctcaaggtcatctctactgatccattgaccaatggagttgcaacattctgtgccattcacttattcacacattcagcaaaaagctttgcaaatgtcagggcaagggatcctgaaatgtcctacacagtacaaatttatataacatggggttgtaaagataagcatagaagtctgttctttacaccaatagatggcttgctaaggaacagaatcagccgtttctgttttctggtgtgattggaaccaggctctgtgtaataactctgtacattaatttgaatggatgaagtggatgctgttgggggccaagtgtgtaaccagaatctgtattctgactaaggagttaaaaatgaatgttctatagacttctttgtagtgctcagatctttgagcaagcctggagaaggaacaaatttcccccatgtcctccgacggagtgtttctagccatacaaaacaaactattatagagcagccacagctaacaagtcactaatatcttgagatctgggcaaatttttaaaaggcaacttttctgcttacccaatccatgcaggaaagcatagctctggggtatcttactgctagcccctcctgtgattttacacatcctacaaccagcagttgcaaccaggtgttgtgactccctccaggtcatatgtgaccactatgatcctgtgtctgcccatctatggacaatgagatttagcctgtcatttccctgctggtctaagagatctaattatctcaaccctgggtttgaagcacacttcatctttccagggagaccccaccctagatcccacctccagaatcagtcaccaggcacttccctcctcccttctatccagaaagaaatccatgttcacatccaccttggaggatctgggaagcaggatcggactaacatttcacattcttaagattatctcagagctcatcgagaaacttagagctctgtgctcactgcggtgccccaaagccatgatcccagcccctttcttgttcccagcactgattcgtttccctgtactattgtgtcttcctttcagttcttccttgagagcagaatttaagttgtttattgattcgagctgtaaattgctccgcaatgctccaggcgggagagcaggcaactgtacaaattccagcacacctagagcctctgcctccacccccaaccgctgaggtctttccacctgcagtgccatcttttaagcactcttgctctcagatgtcattcctccctcccccattcaaagccaagaaaactgtcacttttccagtgtccctactgaaaccccattttcagtttttgttttgttttgttttgttttgttttgtttttctctatgcagacccattcatttgttaaggttatatcttcagtcccttctgttgagctaggggaagggtagcatacatttcttgttgatgtgacaacatcaacataagagcctggataaaactccttaaggaggaaagggtttattctggctcgtggcttgagggtatgctccatcatgacagggaaggcatggtggccggagtgggagacagaaagatgaatgttggtgctctattcgtcttctctgcatttagttttggatcccaacccttggaatatggctgttaccgtctagggatctggattgggtttgatgtctcggccagctaaagaagtaaagggcaggaaaaaatctcacgtataataggaagcagtggggaatacctttaccaggcgatgttgtggataattttgaataaagtggctacagtagcctcaccgagaggtgacttattaacagagacttgaaggaggtaagagattttgagcccaatggatctctaggtatggaggaggagagaaatttttccatcagagggacagcctgcgaaaaggccctgaagctggtgtgtgcctgctttgttcagggaacagcaaggcccctggctgggacagagtagacagggagaaaagtgggaggcagtgaggttggggcacagggtattggcagactggagcttgcagagccattcaaagaactaagaatttggccatgcatacactgagaagtggttatgggcttttcaaacatacaagatgatttgcttgcatgtaaaaaaagatcagttcagctctggattatttgggaatagtttcttaagaaaagacactgcacgcccatgatggactatatggtgccatttgagagagggctgcgggtagaaatagttggactgtcaacattttagaggtccagtcagctttgcaggtggatatgtagaggaggcaagagaaagagaactctgtttccttatgggttactagaaggataggctcccagccacctgagatggggaggaaggtgggcagagcaggagcaggaggggactcagaagtgtggtgttatgtgttttcagatatggtaagtgtgaaatatacactaggcagctgatggtacaagacagctgtaagacttgcattcacattgggtagtactgacttaatctctcagagctcagattttgtactgtgtgtgtgtgtgtgtgtgtgtgtgtgtgtgtgtgtgtgtgtgtgtgatgttcattcctgtgtgtttacacatacatgtagaagccagagattgatgtcaagtgtctccctttgctgctctttacttcattttctgaggtagaattccctactcaatctgtgctcattgatttgcctcaatgtctctaatctctccccccacacacacacacccatgctgggtctacagacaggcagacactaccatatccatctggcttctacgtgggtgcaggggatccaaactcagaggtcttcatgcttgcacagcaggttgtttattgactaagccttctccccagtcctgattccgcacttctcaggagtacataattttcagacttggactagagggttgactgtcactgtgtcctggaagcacagtgagtcttacagctgagaccctgcctcgtgtatctctagacagacccaggatcaagtggctcccagcctctcctggctgacatgaagtgacttactcttcccactctgagctttagcttcttctcttctaaatgaaagagctggcataagagacctcatgaacaacctcttgagggtttcggtgttaaggctacgtgaggctgtggcagatgggctctgctttacagctccatagtgtcctgcttcctcctgggaatctgcatatgtatgtgcatatttgtgtatatacacatgtatagacacagcatatcccagctctgaaaggattgtttctttagccacattcnnnnnnnnnnnnnnnnnnnntgtggtgttatgtgttttcagatatggtaagtgtgaaatatacactaggcagctgatggtacaagacagctgtaagacttgcattcacattgggtagtactgacttaatctctcagagctcagattttgtactgtgtgtgtgtgtgtgtgtgtgtgtgagatgttcattcctgtgtgtttacacatacatgtagaagccagagattgatgtcaagtgtctccctttgctgctctttacttcattttctgaggtagaattccctactcaatctgtgctcattgatttgcctcagtgtctctaatctccccccccccccacacacacacacacccatgctgggtctacagacaggcagacactaccatatccatctggcttctacttgggtgcaggggatccaaactcagaggtcttcatgcttgcacagcaggttgtttattgactaagccttctccccagtcctgattccgcacttctcaggagtatataattttcagacttggactagagggttgactgttgttgtgtccggccagcagaccacaacctgggttctagcctggaaaggcattttggaaacctggaagagaagaggggctaggtggcgagagaaaagaatgtagccaagacagttactctgatcaaggctcaaattttattgttgcaacactagttatgaaggaagggggaggggacccgattcccgccgaataatctctggtccagtagaaaggtgcacctgtgtggctccgcaggttccagcagtgggcgtggcagaatgaatgagcaggaagctccacccctgagcaagcaggtttcaggctgggggaggggagactacatttcctcccttttattaacaaaatttaaaaaaagaaaaagctggcctgagggggggaaaattcaggctagaacccaggttgtggtctgctggccggacacaacagactgtcactgtgtcctagaagcacagtgagtcttacagctgagaccctgcctcgtgtatctctagacagacccaggatcaagtggctcccagcctctcctggctgacatgaagtgacttactcttcccactctgagctttagcttcctctcttctaaatgaaaaagctggcataagagacttcatgaacaacctcttgagggtttcggtgttaaggctacgtgaggctgtggtagatgggctctgctttacaactccatagtgtcctgcttcctcctgggaatttgcatatgtatgtgcatatttgtgtatatacacatgtatagacacagcatatcccagctctgaaaggattgtttctttagccagattccctgcttcctggccacactagagactccctttggccagcgccttttgaacttgactccttcatgtctggttccatgctcttgatcttcctttttggccaatcatcgggactcccctcacccttcctagtggccacagcatccagagagagcaatccaggcagccactgttaacccagtaaagccacgctcatgtctattgtataaagaatgcagctttgtttattaactactttcttggtgctggcctcccccgccccgtgacccaccccccagactgttaagtctactgatttctaaaatgctgcttgatctgaacattatggtagagtttattgccagttttattcctttccattttactgccacatcattcttggtcatgcatttatcacagaatatcctaatggcctgtctttctcatccagtactagggcaggaattggacatcagctgtctcagtggatagaacagccacttcagtagcagaaatcctatgggaacttgatgactatttgtaggatgaattaatcaattaaggatttaatgattgtactgagggaaaaaatagttgtgaattcacctgctcagaaagatatataaaagtatcaattcctttgtgctccttcattaagaaaccacagagagttctagaagacaggtcgttttcttgaaccacatgactcctggacttaggaaaactccagagcaattaaaagtctgaaaccacccagctcaggacatgccatgccatacagaactcaagccccagcaccatccagaccttggaaaaaagtactcaactgaatgttcttgaaatcattgttgtaagttacttgattgacacaatgatgtgcctagcctagccaatagacagaactaagccttagctataattaagcaaggtgcagatgggctgctgaacttgactctgaactcacaacttagccacaggggaaccttgctcacaacttagccacaagggagctatatcaagaaaggctagcagaggaagtgatacctaaagtgagatgagtcagagtaagggaatggaaagatgctattggtatgctgaaacagatggattcatactggtttttcttgagacagggttaggtgcaaaagatgggccactaaacactggctatattgcagcacatgaagtggggagagctgaaggtgtgggttccttgcaggaggatgagtcaataggctaactgggcaataacatagatcttcccgtgtaagcttggtgacccctgtaatcaggcctcccagtgtggaagctccctgtgtgggttgtcaggagatgttgggacacagtcagaatcagagtgaccaagaaaatagcccgatagggtaatgggatggctagagagaagtgattgagtctaggaattttttttttaaataaaatcattttggcagattgttagaccatgggttagcaagcaatagtgtgtggataaaatctggcctattgcctagtcttggttttactggaacattcaaacgatagcaacggagttgaggagctatggaagaaactctggtctgcaaagtccaaaatgcttactgtgtgaacctttaagaaagcattactcacccctaggccagatgcagagtgtggggaattaaagggaaagagggatttgaagcgttgtccaaatctctgtgtattgatgcctggtagaactagagagtggaaagtgactgcctgggcctttcattcctctcttaaatgaatcctgatgctcagtctgcctctgcctggacctccttcactagaaacctgggccccgtcctccctgttgtgtgtcaatgtaactctgctacaatgaattgttcttctacaaccttgcttttgacttcacctggccttgggattaccctagtgctgtcatctagcttgaccagagccctgagcatggatgaacacctccctgtctgggtctttatgcatgtgtagcccaacgatcatcaagaactggacctgattctattacaaccctggcccaggctgcccctcttacattgtctcccccaaggtcacctctagctgtcctactgacacccaaatgcccttcaggccaccaaatatgccccgatggatcggctaccagaggatggtactgttccttctgtctccctctcaccccctccaccccagctgaggtataccatgaggacatagtctgtgcctgtctctctcagaggccaggctgccttttttcaggcaggtcaccttttgtgggtgtgtaaatccagttttctgcttgtcaaagtgacattttcatgaggcccaaagttattaagtggcatctttgggtgcctactttttaagcaaagtggagtaggctgggaaatgtcaatagtggtaatgtacagttatgtccccaatacccttttgattgagcacatgatggaaacagtgcgaaccatggagccctttgcagggaattgccggttaaagaatttgttcagactcatggcttcttaactataaactctgagtgtcttaaataaaataccagctgccatgggcctccgactgactagaaaatgtcagagctcagcctgcaatgctctgacaggctctatagcctacagcctacatgtgtgggctcagtgcttttccagttgtatagtccaaactggcctcagtttgagcgatggaaggggtctgtcctggccctctgagactgctgggctgatgatggtgctgtcctccctccccctgctgtccctctccccctgctgtccccttccccccatgcaggagagccagatggaaaccctgtagatagaagtttaaatgaagaggagaaaaagagagagccagaccagtgacctcagactttcatcgtgggttagttctgtgaatgccttgcactcctccaaatccaggcttggggtaacatttctcccagtgtctaacagatgcttggcaattgtatattatatgatgctgtacattgccttatcttaattgttgagatccctctaagtcccaccttgcatccttttcccagaaaaatcccttcctatttttttctctagggccattgtgtcaatgtatttattaatcatagtagggtacctctgagtggcttgggtgctttgtctggcccatggcaggctggtccttatgtaaccaggctcatccagctgaccttcctaactccatgtccttgatggtttccctttccctggatgactctcattctcctatttcctttgtgtgagggagaactgggggagtcatgtgtgggtggcatatgtgtttgcagatgcacggggaagccagaggtgttcacaagattcatccatcattttatttctagacaggacttctcagtggaacttagagctctctgattaggctggactggctacccttatgggaattatattcaaatgtatgttcaggagcaagggaagagaggggggagggaatggggaaaaggaaaggggagacggaataggcatttttttgtacagcaatttaattttcacagtgctgatcaatatggacttcacttttagagtcagtggctggaagaggcatggaatgggggtggggctcctgaggtgcctagcatgtatacagaatattttctttgtcatgtttcttatgcaaggagcaggatgactgttactggtgaaaatttagagatttgtgtatatacgatggctattaatcatggtaaaaaagtacagaagcaaatagaacagttaattaatgaaaccttagtgaattcttttagagaagaggatagggggatgcaggagcaggaccttgtttggcgtccagggactttccagcaagacacaccattttctggaggctctggcagagaatccttccttgtttgtattccttgaatgtgggctccaacctccatcttcaaagccaggggtgtgagatcttctaccctcagatctctccccctcccatgttcttcttgtctttcctccttctcttccttatccacttctcgccctgactcctgacatctcccttcctcctccttccctccttttccagattatcctccatccctcccccgcccctccgtccctccctcctccatttctcacttttaaaatctctgtgattacattcagggtcatccaaataatgaagtcatccccttcccaagatcattgacataataatttaattaacttcaacttactctgcagtacttcttttccaatgtaagataacctagtcatgaaagtcatagggtccagaggttattaggacaaggatgcagacacttttaaatttttgagaggacagtattctgcccactatgatatttatcacagcaatgctgtgttgctaaaagtgtcaaaaccacccaagtattccaggaacacaatggttaaatgatttcacctccccaccacacctgacaccattaaagtgcttttgaagaactgttcataatgttggtgattgtggagtggacaattctggagctgtgcaaatttaagagcattgtgagttgtaaaagcgtgtacaaaggattattatgacaattaagagcaaatatgtctgcaaagaaataatagttcacatttgttgtggtttgtgggtgaatcatatgttttttttttctatttgtctgcatttcccaagttagtctgtgatgagcgcatcaattttaaaaaagttagcattgacaaatacacccatatatacattaaatgcacacatgaatacaccacacacacacacacacacacacacacacacacacacacacacacacatcctggagtatgcagagcctgaaatgaatgggattctgaagttcctgtgcatccaagttagacaatgggcctgctgatctgatggatccaaaccctttgtccatagtggtggggatcactgtattaggacatctttgcctcactctgaaagtttgttagtgagtgggtgagataaatgagaggcatcccctgctcgacccatccagagatgttgatgtttctctgctgtggtgatcaaattgctactcaaaaagaacagtgtatctcaccacgtggtctgaagatcagcagtgggagctccctggtgtcaggctatacattaacaatgatggtagactgttcccaacccagaagactgaatactatatataaagaacacccttagaaatgggcattaattccatgggtgatcaattttacatatagtgaaagcaatggcctacaatacaagtgtgtgtgtgtgtgtgtgtgtatgtgtgtgtgtgcacaaccagaattagtccattattggagctttctgaggactttaactcattattatactaaaagttttggctgccttagctgcattcaaacaccttaaaaatgaatgtacaaacatagatgtacagtcaatcccagtatctgttagaattaaccctcaagcccctctcaggtataaaatcctcagatgtggtattttgaattagctgtcccaataagtcttgggtatttgaatttttggatctcagctgggctagttggggagagggaaaatggagttgctggaagtcactggaggaaggctttcaggtttcaaagagtcatgtgaattagatttgtttcctatttatggatcaagatgtgagctctcagctgctgttatagaacactgcctgactgcctgatgccatgttctgtgtcatgatggttatctgctcctaaactatagaaccatatgcctcctctcaaactattttttctatagattgccttggtcatgttatcttacacatgttatttaatcacaacaatataaaagtacctaataatagatactcaggtctcttgtataaaatggtacagagtatgcttataaccttccacaccctcatttatattttaactaattacctctaacatttaatgctatgtaaatgtcatgctaacagtcattattctggtattattggctaataacaccaaggaaaaaaaagtacattttcaatacttatacagcctgactacacactatggttcatggtccacgattggatggatctgtagatgttaaatccaaagatatacaatcttcaaatattgagagccaactgtggtagagacctcaaaagtttggaaaccatggagaaacggaaatttttactcagtagaagtcaagaatgaatgacagtgtgaatttcctaggaaaaatctttggcatttcctggaaatatcaaaatgtctgagtctgtagcttattaattatgagcctctcaccttggtaattaagcaataaagacccatcaggcagtgtatttgtgggtgattagagccatgtttgatgtcgttggaaacgtacagctgaagattaagtggttctcaccacctgagagaggcattaatcatcggagctgccctacctggtggatttggtgacttctttagattggcacttaagcattaaagcagagactccctgttcatgcagagccgagctgcagactgaagcctagtgacttagcaagggcaggcagtgtttctgtgagtgatattatgactctgcatagcatctgcctgtgggtcatctttgtgctcttgtcaaggagggacagatggaaaagatgccccagacccctatgacacccaacggatgtcctgccagatgtaaggactgtatgtcattgagacaaggtaacacggtagaagcattagttttagaagtaggctggttgaatttaagcagtggcttcatttcttcctgtgaagcattgagcaatgtcatcttactagatctaggcataacaatttgcaggtgtcagctatttccatgttagaaatcaggcctagcacaccaatgcattcagtaaagagtgatgatttagtttccatgtgttgtgttagtccattttttcctcatgcttaaatacctgagagaaaccatatacagcaagaaagatctattttggcccaggatttcagagtttctgtctgtgattggcatcctctgttgttgtggacctgtgctaaggtagaacatcatggcaaagagaactgtggtgtggtaaagtgacttacatggtaagcaagaagagggatccaggaagagaccggggaccaagcataaccttcaaaggcataactcagtggcctacttctttcacctagaccctagttccgcaaatgtctacctcctcgtaaggagtgctgccagctagggatcaaaccttcaagacatgagcatcttagagtcaaactgtgcatgtgtgaagcagattggataatcccagctaagtgtgtttgctccttagaaattggctgaaggtctgttggtctccgatgccatggctgagctggctctgcttggggtatggttccaacatctcccttcttctttaaggaccagtgagtgagtccagggcttcatcctcttgtggcgagtgcagcagcatagaggatatgtgagggatgcagtgaaatccttgtgctagagtaaagtttaccacataggactctgctggtcctgggcatgggcttctgaccaaggcactgttacacaatccagaatctagtgagcatgccaggcattaggcagacaagcatgcatatgcacagaaataaatctctattgtcttaaacagtataaaaagatactaagaggagttaataggatatatgcggcaaaaccatctgccatagttgaagaagaaagaaaaactttctatgcactactctaaagccatttattagaaattagttttaactatttttaattctctctctgtatgtatgtatttatgtatgtatgtatgtatgtatgtatgtacattagtacaggtgcttagagaggccagggatattggatattggtaactgtgagctgcctgatgtgcgtactgggaattacccccaggtcctttgctagaacaggcagtgcgcccttaaccactgagccttctctccagctcctattctaaagtcttaagcagaatgtctagcctgaatactggggacagcaaggcaatatggtcccttgtataaagactcccagccaaggtgagggcccacacatgctctgcttactaagccttgcaggctgggttggatctgttgcatgtgggtcatcctgcagggtagggctgttctgtcttttccagctctaaatatctccttaagtttatggtacatcaataatacagtgttcacagtgggcagaagtgccggagcctaagctgggcttcattatgctctaccttctcaaatatcagatcgcacgaatcagcacactcagaggtgatggctccgcaggaggaagagaaggaaacacctcaagctggagagtaggagagagcctcggataggtcttgctagacaatgttaactgcgttcatggggagactgtgaaggctctagcctgtgtacagctcactcagcattgggtagtaggtatgaaagaacttggtgtcagagggccttttgcttcctgcagcctagagcacagggtgcctctggccaacactctgaagagcactcactatcattttgtatcaaatgccctccagtctgtgaggaaaagaagcactgggcctctgctgtgttagcaaactagtcagttccgctaactgttgctcggtgtgtctgaggctcattttgtcatctctagagtgagaagagtgaaaagcctccccgcttccagttgctgtaagggttccaaggagctgtgttgtgcaaagtgcttagcacagtactggcatgtattgaaaaaaaaccctgaaatttgatttatttctagaggatcccaggaacttgaagcatcttgggtttagcagcgttgacagctctgtataggcccggggctgggcacctctgaccctgagtcccagctccaacaactggacttcagtttatggcagtttgtttgagttctggcattcagcttttatttgagagccaacccagaggggcatagaagaaattggatttatttttatgacagttcttagtggagcctggcaatcaatcacgtgtcaggatgctgttttgaaaagaagcaggttggaggtagactttggagacccagctccgctttcagagtgagcgggtggtaaatacatcatttattcgttctgctcagttttctcacctgtgaagtggaggataagaattccaaccccagtgacgggtctcctgggattctaagagatacagaagtgaaagccaccccaccccaccccacccccaaaccccgagcactgcttgtgtggcacccaatagttagtcaatgaaagctcccccacttttaatgtctttgggggttgggaggaaggcatcgaaaaaactgtttaagccattttgctgtgtcaatactaattaagacaatcacaatcatggcccaagtaccatgcatcaatgcagacatcgtaggccaccagaaaaaatatatcacagcagcaaagcaggccgctgttcaataaatactttgtgactgattagtcatgccctgcatctgtgcagtacttcagagctaatgaagcagttccgctctggttgggattagtgactgctcacaacatggagaggaggttggcattaactcatcggacatatatttctgagctacgaaggagacaaaacattgcacacacacacacacacaaaatgtctgtatggttggggaaatggggcggtcagttagtcacttctcatgagtatgatgggcaaagacatgattcagaagagaggtcacccccaccaatcacagaaggcttcccagaggagacagtgcacctgtgtcctgaggtgtagcaatgagggtatttaatattaattaatttgtcacacgtgcatatgcatgtgtgtgcatgtgtgtgtgtgtgtgtgtgtgtgtgtgtgtgagagcacgtgcttgcagggtaagggcctttaccagatgaaatatctgttgaccctcaggagtttggtccagggatgcatagatattagacaagttggctcaaactcacaatccccctgcctcaaccttccaaatgctgggaatggataagtacctcattttcataggtgaaaaggaatgcaggtagaagcaggttagactgcagtagcaaataacaccaaagacagaaaagctcagctgagctgaagtttatttattatgtagttaattacttattacttcaatcaacttttaatttggaaataattttaaatgcattgaaaagttgcaaagattgcatggagcattcccgcatacttcacccggcttcatctaatgctagcattttacattgctgtggtatatttgtgggctactattgactaaacttcagattttattgggattttagctctaaaaaattacatagatgtattttttctcctccatgattaatgctaagatagccctgcattcagtgcaaattcacttttgctcactcactgggtaaactcagtgcacagttctgtaaatgttcatcaagagttgggacagaggctctgacatcccctctacccggctcctgagtatcttgtcattgtcatcctgaccattaattctactccccctttatgatgaaaattcttagagttgattgtgcatattctatgtagttttgctctggacataaaacctttgttaaaaacaatacaatctttcaaagaaaagccttcctttgaaactgcatacagccaaaataggggccagagatgcttctaaccttagctgcatgataaggaggggagaatgaatcagggagagaattattttttctgtgccataaggaggatgtgtgtgtgtgtgtgtgtgtgtgtgtgtaggtattggaagtagaaggaattgtattaataaaaccaagagggatccaatggcaggctatgtagtcagagatagcccctgctcccactttaggagtctcacatgtggacccagctgcacaactgttacatatgtgcagaaggcctaggtctgtcctatgcatactctctgtttggtggctccatctctatgagcctctgtgagcctctgtgagatcagggtactcaattctcttggttttctcattgtgtccatgacccctctggttccttccatccttcttccccatcttccataggattccccaagccccggttaatgtttggctgtgagtctccgatcgatttctataagttgctgggtaaagtttttctgttgacagttatgctaggctcctgtctgcaagaatggcagaatatcattaatagtgtcagaggtgggctctctctcatgtcatgggtcacaagctgggccagtctttgattgatccttttctcaaattctgttccatcttttaccccggtatatcttgtaggcaggacaaattgtgggtgtaaggttttgtagctggttagtgttgctatccctccaatagaaatcttgcttggttataggagatgcctgttctggctccacattccccattgctaagagtcttggctagggtcagcctcatagattactgggagttttcattttcctaggtttctagttcatctcagagatggcacccaatccagttgtctctcctagtactctctccctgtcttctcactacctcatccctcctgttcccaacccccaataagaagggtcttattacttagtatttttgtatctgtggattgtagcatggttatcccatactttatgacaaatatctacttataagtgagtacatatcatgtatgtcttttggggtctgggttatttcacttaggacaatctatctgcctgcaaattccatgatgccattgattttaatagctgaataatacttcattttgtaaatgtaccacattttctttatccattcttggttcagggacatctaggttgtttccagcttttggctattatgactaaagctgctatgaccttagtagagcaggtatctttgtggtatcatggaacttctttggatatctgctcaggagcagtatagctgggtcttgaagttgatctactgccaactttgtgaaaaactactaaatggatttccaaagtggttttacaagtttgtactcccatcagcaatggaagaatgttccccatcctctacatccttaccagcacgaattgtcagttgagcttttgatcttagccattctaatggatgtaagatggaatatcagaatcattttgcatttccccgatgactaaagatgcctttgggtccctttaccctaacagggctgccttgactagcctcaatagaagatgtggctagtcttgctgcaacttgatatgccacggatggttgatatctataggaggcctcccactttgtgaggagaaggaaatgaggggcggagaagatgagggaggagaaactgtaatacttatgtaaagtaaataagtaacttaattaataaaaaatacaagaggaaggaccaatgttaatatgcccattttgtaggcagaaaagttaaggctgtagaaaggaaggcacagctgttaggcataactacaggcacaaagtccagggctatgtaggctacaaaccaatctgtgttctttcttcctggccccagagggcttaagatcaatagtcaaactgtaggatgaataggtcacagggctactctatctcatctgtgtctttaaggatgacttttctcaacactgtgacaaatgtctgtcaagatgactttagggggaagaaaggtttactttgccccacagcttagagattccattctgtgctggtgggggaagcattgttgcaagagtacctgatggagttccatgaaaggaggagagcaggaagctgagagcttaggccaatccagaagacgatatgaccttcaaggacacacctctagtgacatatttctatccactagcaccaatatctcaaaggctccatacagccccagagactaccactggttagaggccaaatagtcaaacacaggggcctgtggcaatgttgtagacttcagccacaacaaaggctgtttttatttttcagttgaactgaaattctttcattgtgatgaaacaagtaaatgaagaaagagggtaagagagggaatctcagggccccagttgatctgatttttcttaccaggcttgaagtcatacccatacccagaggctctgtcacagctgggtaagatggggaccatgtctgcctgtcatctccagcgtgacgctggtgtctgcttatttctggctggataggacataattgctccccaggctgacagtgacaaatggtggtgtgggaagtgtattcctccgagtgatgggatgggcttgtgtttctcagctgccagaaacaggccttgtcagaaaacaacagggggatttcttctcagcttgaggcctcccgggcatggggggcagattcagggtatgagcctcccaggagctagtatctgactcttctgggatatgaggtaccataagatatatgccagggctttgttttcttggccaccatagtctctacctgaagatttctttttctgtttcatatctccacggtcaggcattatctgaagacactaagtagaaacatcacaggcattatcaattcaaagttttaagtctacagtattttgaagagtgtgatagggtgtgaattgtccctatatccagcatgtccaccctgcacgtgctacctgtcctcagtcacttagtaactgtctgggacaacagatcaactgcagtgcatcccaggtcaataggttggtgctttcttcacccagcctctgtttcattttatatctacaaatctcagaacagtggtactagagctttatcacagtctatgatcataattattttatttatcattatctattaccggtaatgacttgtgccctctaagttctaaattgaaatatatagaaaaccaaaacatatgtatcaatttctaagtatcttttgagtggtttgggacatctttccagtggataagggtgtcaacacacttttgacatgaaggacccaaagccccaccacagcggttacagcatgacctacactagaggaacaatatacttcttgtgaatagccatgaaaatggaaatagatttattgagttcatccttcttcatttataaactagaaaaaggccctttgagaaaagcttagataatacaagatgataaccaggacaaagccaagtcaactgcatatcattttaatcagaggaactcatttgagatttggtacctcttatttatttatttattattagatattttctttatatacatttcaaatgttatcccaaaagttccctataccctccctctgccctgttcccctacccactcactcccacttcttggccctggcattcccctgtattggggcatataaagtgtacaataccaaggggcctctcttcccagtgatggccgactaggccatcttctgctacatatgcagctagagacacaagctctgggggtactggttagttcatattgttgttggtacctcttatagttagggatggccatagtagaagctttgaggttgggatgcatggttaaagaattttcactctgaactgtagcctttatggacagcctgtgaagactctctcttctatctgatggacccatgctgtattagtcagggttccctagagtcacagagcttatggagtgtctctagatagtatgggaatttattgtaatgatttacagtctgtagtccagccaacccaacaatgggcagctatggatgggaagtccaaatatctagtactgtgtgcacacgcacacgcacacgcacacgcacacacacacacacacacgatagagttatatcttaagactgttggccatcatctgctttagtctccaaaaagacttatgaacatccccatgatagaggtatatttaatcactttattgcctgaatattatttcattctatatgttccacaatttaacaaatcccctctttacggacattaaagttacttctcatttaattaatatatatatataattaatatgtatataatattttcttttcaatgactggcaggctgatacaaaactctttgcatgtaccaaagcattttcttaggacatgtccctctaagttaaatcatttggccacattttaatgatgttttctcatcaatggaaagtcaatgaaaaaaaaatactggtttaaaaatcaggagggtgaaagctccatccttctaaaaccatcaactcaatgctaatctggtaagtgaaaaaaaaataatgtccttttcatatattgctgtttgttgattgttaattttgaacaacttcatatttatcagccctgaatattaccagttgcctcttcttgttattctttaataatagacttttgtctgttaaagattatatttgtttgtatattttatttagctttaatatggctatattcttcatattctttctgtagagaagttttcaagtgttctttcttccattttttgtttttttaggaccattgtcccttcagggaaccaagaccagaatgtggttatattcttcacattttcttctaacatttttattgttttatccttcctcttcctttatgtctttaacccttccattacttgcaaaggagatgtaatcatgtggctttggtttatactaaagctacaaagaaagaataatgtggagtcagtgcattaaatgtagttcaggctgcctggcctgcagccctaggggaagacatttaattctgaagttaagtgaggtggtgatggccagatgatgagggtgatggtcatagccagagtcttagggactgctaggacattaaagtcagtggctggggcttagatataggatgaatttttgtgcttaaatccttagacattgactttggtatagaataaagaaaaatgagtgcacatattcacaaatatttcagcctaagaatgctaaccatagctttgtgatatacataacatattgtgccaaaatgtagaaaaaaaacaaatggcagttcaaaggagcatagataaatagctaaagtacacacaatggaatactacttagcaatagaaacagaccatttcttcatacacttgggaatacagattaaccttaaatctttcattttgaacaaagctagacacaagcaagtatatgcagtgtgaatctatatgtcattttagatttgagcaaagcaatttgaatgctaataatggtcagactattaggtacctctggggttgcagtacctggcatgatggatgagatcatccagaagggatggtaataaatgctctctgagctaatttgggtagcagggaagtaggtatgtacacatatagacatttatcaaattgcacgtttaagatttatatacttcatattgtttttaaagtaagtttaataaaagaaggtcctgatcatgggtgaaaaatggtcatctttgctctacagatgaagcaactgaatccaagaagtgtgatttgttttgagttgacatttcaagccagagctgtctagattccaggagagagccaaggtagttacagaatggtgactcccttaactaggacatcctggaactgcatgatttaccgccattcctgagagagaaccacagatagtctcaggatagtagccagtaaggtcacagcctcaccagaagaaacttgttacattatttccatgcccatcctgtttggtctcccacacttttgggtgtctttaaatatgaactggtagaccctggtacttactgggagccaagagcagatttctggtctctctcagtcacgtgggtatttgctttggtaaaaagcaagcagcatgatgatatgaggtaaccagtatccaaagccacatacctaagtccactagaaacgtggaatagcatgtaccaaggatcagcacgtattattccgggactggaaacactgccagcttctaaatatatgctagaaatcatatacacggctcagctgatacacacctgctagatcatccttgccagcctttcactttggatgtccccattacacacaggagacagtgattgcaacccctggaaagcatcgttgatgttaaatattcattgatgatggcatgtgcttttcagctataagattccactaatgcagctttctgctgctgtccatggtcctagttttgcttacagtctctggcctctgccatttgcaaggactttgggagacagggaagtaactgcaggcttgtgcaagaggaagctataccttctagtggaacttctcgggaaactggcacacacgtttactgacttgagagcagttcatctctaaggttccatttctaagggagagaaagcaattgttagagtccttaaatgaaggcaaaagcagacctcatttagagctgattgctgcgtcccagggaccggcagcatttgccgtcagtcacaggttaaccacagggcactggtgccaattctgaagcctcctagacctttcattccctggaaggaaattgccagcagatgtgaagagtcattagaaagaggctgggggtacagagtgggtagtgatgcagaccttcattctcttcctactaagtaagaagtcagggtggggatttcactaaagtctccctggatcccagttagacacctagaagcatgtcttcaaccaatggcaatattgtgttaagagcctgctgagtagggagtgcttcaagtctcaaagccatggagtcagctctgtggatgttcacagtcagtgaagggatacagaatatccttagttagtcttggggtaattcagatttcctatgtagcaagggctgaaatacacatatctcagaagcccagctacctgcaaatggtgtgtgaccaatgggtaggagctaaatgaagaacttgactacatgtgtcggtaatgatcttcagctggaggcagtactgtcttccatggggtttggacaatgcctggagacactttgatcccaactaacagtactagttactagttactagttactagtttacaggaaccagaggacagagatgcttaaatatacccaacaacaagggctggggtggatgtgattgtcttcccatttggtaaagtacttactgtgcaacccacataaaaatgttgctaatcatggtgtgtgcttagaatccagcactggggaggcagagataggtctatatctggggctcatttattagtaaacctaattaaatcagtgagccccaggatgattagagaccctgccttaaaataaaataaaaacagaacatgatgcaaagctcctgaataatgatactttaggatcaccactaagcctggacactcatgcacacacacacacacacacacacacacacacacacacacacacacacacatgaatgcacacatgcatgcacatgcatgcatatgctcactcacacatgtgcacgtgtccctataacccctacatgggatgatatagccctaaatactcatagtagtgagccactgctgctaggagtgaaaaaagaagctagaaaatgtctgcttaaactcctgactcctctgtcctctaatcctgtgccagtgcctcctagtgactgaacccaagtacaatctagagccaggggggcagtgggggcagcctgtaggagtcagccccacccccaatgctctgttgttggttggtgcccttacaaggtgagaggacccaactgaactgagctcccaggagctctcctcctgctcagacagcagggcagatgctttgtggccccgggctgctctctttgtcatctttgctcctgctgctgctgctgctcttttaatgttggctgtcagaatgagggcaggccatgaaggtgggagctgcagggagagagagagagagacagagagagagagagacagagagagaaagaaacctgggtaggatgctaggagggagctctgcctgctatgctgctgaaatgtggattttcacgcagcttcacaaacttctcaccccctacctggcttggatgagaaagtaagaattaagtagctacaatatttttttctagcacaatgaactttaaaaatggaattgctgtgcggagcaatgagtgatagttcagtaaacaggctaagtacaattacattatggttgtttcggctctgacatttctttgggaacagaatagcatcagtgtggatgtttggaagccaggctattctcacttcttggagcacagggtgttccagttaggaatcaaagagcatccgagtggtctctctggtttaaagggacatttcagtctattgactctcatggactacatactgcccctccttcaacaataatagaatttaagaatacatgaaaacaaatgagtttgctgaaaacaaacaaacaaggggggaaagcaggaactctgcctgttcctgccacggccttcctgtctaggaagacagacagaggagaaacagatgctaagtgtgcacttcagtcaatgactgaaagacacagtgtgtgtgtgtgtgtgtgtgtgtgtgtgtgtgtgtgtgtgtgtgtgtgtatactcacagcagacactgaaagccagagctcaagacccaagcagcttcccatgcaggagctgagcatctccagcctctctgtatgctacacagagctgctgaaggtgtcttgaagaacaggcgttcagggcagagagacacgcatgagtctcttagtgccagtgcctaagagacatttgcttagtgctacctttagatgtgtgactggttagtggtctcaggctcagaggaaaattacctcgttttgaatagagacatagcatctgccattcctttttcctggacattagcatctgctcatttcactagagttaaggaagaattgattagaaaatgatgtttattgagcatccataacaacagcgtgtagggcatagatgcctgtggccatgcatttttgtctccatagaaagtcacacggagctaggtgtcatgctagacacaggttctgggaggaaacatcttttgttccaagtcatgatcttctgacctgtgaggactttggtaagttactttgtgttatggactttagtttcttcatctgagaaatctcaacgacaaaatatcccgttgtaataaggctgaattagcaaatatataaaacttgtagcaggggaacaatcagcaatgtgctctccgctttaccaagaggcaagatcctgagttgggatgccaagcacccatgtaaaaagccaggcatggtagtgcatagtagtacaggagctgggaagacaaaagcagacatatttctggtgattactagccagccagtttagcgaacccagtcagtgagctccagatgcattgaaagaccatctcaaaaaatgaagtggagcgtgatttgggacattcacctctggcctccacaggcactcacactcatgtttgtgaacacccaaaatcaatccatcaatcccctccctctcatattcatattctctctctgtgtctctctctgtctctctctctctgcctctctgctctgtctctgtctctgtctctgtctctctctccttcccccctcatacacacacacacacacacacacacacacacacacacacacacacacacacaccactttagtagcatagtgatagtcctgaatacagagagttatatatgggctggaccactagcctccatctacttactggagagggggttgctgagctattgaccttagtgttctcttctgggatggacactgtctgtaatcaccatcctctaagtctcatggcctttttgtaatatttgagtgagatgcagaaaatgagaaagaaaatgaggaatctgctatagacctaggcacacccatcttcaggctcaagggaggatccagggcctcaataacttgggttaatacggaggcaacctattgaggagaatggggaaaggtttcccacaggaaaacacaatgtgccttttgtcatctgagctaggtggatctgtacctgagaggattttgtgaactaacccagacagggggaaaatcttcaatagacactttcccgcttaatactggggcaacttgaaaatcaccttacttctcagggcctctgttttatcttcttatctcctttgtcctcgtctttgataaactgtcaccttcttagaaaggcttttttatattaaccggctttattatagcaatagaaaaataatattgtagccctacaacagaattttcttttattacttgtgtcccccattaggcaggacttcctggaaactgtgactctagagtctagagcaattatctgtcattgaaggagtctggtggcagaatgggatgttccactttcacagcaaaaagaaggtgtaagcctgagctgaagacaagcattctttttttgtttgtttgttttacttttttattagatattttctttatttacatttcaaatgttatcccctttcctggtttcccatctaaaaaccccctatctcatcttcccttctgcttaccaacccatttcctggccctggcattcccctacactggggcattgaaccttcacaggaccaagggcctcccctcccattgatgccagataaggccatcctctgctacatatgaagctggagccatgagtccctccacgtgttctctttggttggtggtttagtctctgggagctctgggggtactggttggttcatattgttgttcctcatatggggctgcaaaccccttcacctccttgggtcctttctctagctccttcattggggaccctgtgctagtccagtggttggctatgagcatccacctatgtatttgtgaggcacgggaagagtctcataggagacagctatatcaggatcctgtcagcaagaacttgttggcatccaccagaagaatgctccactatgttcatagcaaacatatttataataactagaagctggaaacaacccagatgtcccttaacagaggaatagatacaaaaaaatgtggtacatttacacaaaggagtactgctcagctattaaaagcaatgacttcatgaaattcttaggcaaatggatagaactagaaaacatcctgagtgaggtaacccaatcacaaaagaacacacatggtatgcactcattgataagtggatattagcccaaaatctcagaatactcaagatacaattcacagaccacatgaagctcaagaagaaggaagaccaaactgtggatactgcggtccttcttagaagggggaacaaaatacccatgggaggggatacagagacacagtgtggaacagagactgaaggaaaggccatccagagactgccccacctggggatctatcccatatacagttaccaaacccagacactattgtgaacaagcattctttttgaatgtaatataatccatgactccttacattctattggacaaactgagtcttgtgataaaccttatccattggaagtactagctgtcagagaggacttacaggtcacgtggcagagtcaaggggttgtgatagaaggaaaggatgttgaaggagaaaatgtcctaactaccttaactcctctgacagtgttaaccaaagttgcaggtggccagtgacattagtatcacctacctgtgtctcagcctaattgatctccgtgtgttcacaatgttgtagtatcattctacatagttttcttactcagctctccaattgtctatcagtctgtacctacctagaggttcagagacacctgtttcgacaggggcatcttccaagcctgggacagcagtataagtactttgaatggattggttaagcaatctttcatgcagaggaaaaagtgggtgatgtaccaagtatcactcagagcatcaagccctctatttcagactcggggcatccttccccagagacacctttccctttcacatgctgtgctggcaaagccctgagtttttctgaagatcccattggagctctcacttgtcagtcatctcccacagtcttgtcggctgacaacaatttatcattctctgtagatgaaatattaggacaaggtaccagggtaggcagctcctgttacagacataatacttcccagaaatgtctgtggaaatcaaatacttgaatgtgacaatgattgacttaaggtcttctctttttattaaaggagtaaggtcagttttaagaaacataaaaatagaaataaccctaataaaagttctttaaaaatcttcttttgcatttttaaatgctgtttccagcattcaatctatccttaattttattattgtcattgacaattgagcacaaatttggctagcttaagtttgatgagcagccaatcgagtctaaaaatttaccattttcaacgaagcttaatgagtctcgtcattgccttggctgcacggtcctttgcttctcattctaaatgtgtgtttccataatttcattttgatactctgggttttttttttttttgcagaataataatgaatggcacatggaaaactcaaagtatttcttctcacgtgctttctcagcagccactaagcacctgtcattattggaggtggtggggtctccatggagggatgagaggacaacttccctgccctcttgaaattgcctggctctctggagagttctttgtgttaatagctttgtatagagggacgacacgatattaagtgagcctcggagaaagtgactgttgctgtttgatagatttatttatttatttgtttgtttttaattccactaatgcacaaagcttacattttttaagagaatgggtgtttaaaagactcccctggatgttagatggtgaagagcttcaggatgaataaacagaatttgaggactgcacatgtataattatgatttcttttttcttcaaaaacagttctttttggatctgaatataccacaagtatttaggaggttctgtccttctgtctcagtatatagtacaggctagcctcaaacttgcactcctccagctagcctccaaatgttggggttacaggcacgtgccaccatgtcaggctttatacatttttttcttagcttgaataaagtggctttatgatctttgtggtcaaggaatgcctagatttgcttctcttgctactttctgtggctcttcattgcatgatttcgtttgttgtattcagtgtggcctctgttaagagatgtgctggcatgtccatggaggcacctctactccccatgactggggttagaaagaggacattggttaaaaagtgatcatggaacttagccaacctccaaggatctttacccagtgttgggatctcagtgcctaaggaagaaataaagggaattacaggacttatcttggacacaagcagcttatattggaaagaactggtccaagaagaacaagtctgactgcccactagcatgccccatacaggagagagagccattttctaatgagcccctacttcagctaaactctgtgtgaagacagaagtatttcagttcctggggagagttcagtggtgaagctcttgtctggcatacaggaactccacacaaaccaggacacctcacgcatgagtcattggcacaaccaaagcagactttgacatgatgtgaggtagaagtgtacctattagggttgttcttctgcatgccatcttccttatttctcctctacagccattggttaactcccaaccagaggaaggatttgggggaaaaccattatttttttaggaatggactaactaaaaatgtcaaagcaaatgtgtgacattgaaacatgtcgcaggaacaagccacacaaactagatttcctaatgaatacccaaatagaatctgttgcagcaatctaacttgctaccattttgtgaaggaaaattatattcagtgttttcaggctatgtcatccttgagattcgaaatgtctggattggaggggttggggttcagtgataaagagcacttactgcttttacagaagtcttgggttcagttcctagaacccatctgaaggtacacaactatctagaactctaagtccaggggatttgatacccactcccaacctccatgtcaccgagcacacatgtggtacacatacacacaagcaggcagaacattcaacacacacacatacacacacaaataaataaatctttaagatgactacagctgtttatgctcttcttcacaaggttttatgtaagtggaatggtgtttgtggagtgtatgtgtacatgcgtgtatatatctttgtgtttgtatttgtgaatgtggtatgtatgtaggggagtatgaaagtgtgtatgtgttgtgtacagtgactacgtatgtgtactacatctgtggtgtgtgtgtgtgtgtgtgtgtgtgtgtgtgtatgtgggtgtggtgtatgtgcatgtatgtgggagttcatgtgtctgcatgtgaaagaaaatttgtatgtgtgtatgtggtatgcatgtgggaaagtgtgtgtttgtgtgtgtgtgtgtgtgtgtgtgtgtgtgtgtgtgtattgggtttgtgtatttatttatttatttttggcttttgcatgtagcactccaaattcatatcctggtcatggggtcccagtaatgtgtcaggatccttaaaatagggacagaaaccatgtaatgatccatctctatataatttcccccacttcatccctatgtcatgaactgtggggattttcatttcatttttcaagatctcctagtttacatagctcacctaagtgctgctccagaattcttccgagtcctcatttactcctttggctgtgagtttgtaagtgcttatggtatgccaccagatgccaggcacagggtaaacacacatgatggacaaatgctctgtggttttagaatgtacactcactcactagcaatggacactgggttgttcctatactatttgatttttcctagaagcccacggagtcctatattctgtagttctagacttagaacttacttttttttttttgacttagaacttatattcattcatacagagatgaatgggaggagctatcaaactatcagttgtgcccattacagtctcttgattccctggtaaccgcagacattcctcttgccaacacaaaagctatcactgcctctttacaccagtgactcccgtatcctaacattagacatgcttcccagcatgcatcagctctcctacaagcatttctaacccttgaggatttaaatccattgtggtttataaaattgagacatttctaccagctacagaggaaggcttttcagaatcaaaattaacaatcttaccacaaaattgtaatcctactaatgatgtctttgatcatgtggatctcttccaaatgtagctttttaagtattttcccaagttttcacaactgctaagtgtgtgatgaggagaaacatctgtgtcttacatcattaatttattattcagggtaaagtccaagaaactgaattgctaatgcaaagtctgtggattcatgccatcattgaatattctattttttttaatcttggccagtaatgaacaaagagagccctttgattatagatgttattttcttaattgataatcatgccgttcatgtcattgatcatttaatgtcttttctaaatgtcaatggcctatttatatcatctgtccagttttagaaattgtcttggttgtcttttgcttactgatttgtaggtgagatgaactttatatgtaaaaagatactcatcatttcatgtgctataaacaccagccttcatcttcattttgttttagatatgcttaggaatttagttataatatagataacaaaatattctcagcacaaaagaaagtatatatccaaggcaaaaaatttagaaaaaaatagaaattcagaaaggcaaaatacagtgtgtattttcatatttaatgtttattataatgtaaatataatattgtttatatttctatatttttctatatatgtaagcattttgttaagatacctaattttcaactttagcaacatttattttaaataaatgacaatcttcatatgtcttaattttaaaaccacatgcacctaattatcaagcactatattagccactggcagtgcagctgtgaaggaacccagaccattcctcagagtccattattggatcatgcatttcagtataattgacttttacaaaggagagacacaggctatggagtccatgcataaaaggatatacgaacctgtattgttagcataggaagctccttgatagtgatgtttaaatcaagtctatccaaaaatcagatctaaccatgtatatgtacaatgcctgtgtgcgtacacacacacacacacacacacacacacaaaagagagggatgggggacaggcacctggttgtcataccataagaggtgttggacctactttcttaattctgaataacaatactccaaacccaggaactgcagacatatgtttaatgaatgaagtaattaatactctgtgtgtgtgtgtgtgtgtgtgtgtgtgtgtgtatgtgacttatacatcacacttatatgtcatccctaactgggacctgggccttgctgattcaactcaattgactagtgaccttcagggaccactttatcgccaactccctggcactggcagtatgtatcatcacacccagcttcttatgtgggtgctgggaataaaattcaagtcctcattcttgtgtggcaaacattttctatttagctgtttatcaagcctgtggtgattaataaagaggggaatttcgaagaagcatctaagagtcccagacagcaggctttaccttggtttcacattggaatcacccacatgcctgtgatgatatcaagaagttgtaacccacttggtttggcacacctggattataagaattcttaaatctctggaaagctcaaatgaacccagattgaaaaccactgacataatggtagagccccaagaggtggttctcacactgtagaaaatcattgcataacttcacaaaatagactgcaagcaccctgttctagctggtccagaagatactcatttaatatgttcctatatattggtctagggtctgtactttaagaagtgctgtggtgatagaataggtcaaggccaaggggtttgcacaggctgtatgtctcctttgtcattctgaattatgctgagacaagtaatatgagaaaattaaaaacagctaggaaaaggcactagcaacgactgtctagagaagcagaagaggtcttgggagaagagactcaactcatttgaatgatgctgaggcatcaggataactcaagaccaagagccggctttggattgagtgatgagctcatcaatgaccttgtgagttcactgagacacatgggcaaatgcagattagtgtaggttggagattaaatgagatgttatgaggaaggagagattcgtttaaggaaatctctgggaaagttattttacttgagctaagcgaccattagatttttatgttattttcaattttccattaatgtgccattttagagagcattgttacacaggcatcaatgcggattcatgactctttcagatatattcttagagttagaattgctgaatgaaaaattattcacagtttgaactatagatagaaaatagagataagaaatataaagagccagactgacttctaaaatgagttggaccatgattcaaggatattcagaccatgctaccccactagctgcccctgcagctttcattttaatccatgaaaatgtcatatgtctaaagctttattgtttaattttcaattctttgatacgaaaagtaggaacattttgagtgttttctgcttcctgtatgtctttggttttggaagtaaaaatttgccaccctttcgcattttacccaggagatagttatctgtttttcttactggattgtaaagaatgtttatgtattaatgacatttgtcttggttaccaatacacatggaaactattttcccagttagctatggtttaatggtctgtggtgatgaaaaatggtgtattttatattttgaacttatctacttttaatagttttatctttgaaaccatagttttaaagttttccttgaaagtatattcatctaagctgtggtgtctaaaaatttattccctctggcatttgtttggcagcataacttcatctttctcagatagttaacccatgataacaataccactcggtaaaccagcattaattatcccactattccaaaagttcacctttagattctgaagtattatttatatttgtctttgcttactggatatcctgtcctgttctacatatgacttttctatagctgccatcatctctactttgatcagagttgagggtttatttaaaagaaaaaagtgtctctagactttcgcacaaaactgatttgagaattattctttattctttcattctggtctccatcataaatgtagaaaacctggagtatttgtgtaagtgaagtttcctccatgtttgttctcttaatcatgtatgcaatgaacatactactttaagaggaatgacctacatattaggtgtaaattatacatttggaatgctgagtcatgtattgatattaatcaggaatcatgaagagcatcgcatcaagctcaaagggtaatggagagctgaaaccggaatatccaagagagtgttttcaaaccagagcaggacattagggatgggaccttgaggaaacccattaagcaactagtgtggaaagtcaagtagagcaaagcacctaagctggtggctacactggtccaatcagtgtttggtccacgaaagccaaggcaagaaagacattccagcagacagggctagtctcttacctcatcatgcaacaactgagggaccttctcaacaagatggaagagaagtccacaattggaccaactagaaattgccgaggcataattaaaattcaaagattcaaacttcttcctagcacagatgcagacaggagtagcctaagccagcttattacactagataagaattgactaacattgtacataagggaaaatgcacttagtcaaacaaacaaacaaaaaaatccctctctgtttagccatccatttcaaatttttatagaaaattgtgtaggcagcatcaattatgcttgggcaaatttagactaattaatgggttgactaagataattattgaaatttgtctatggatgaaaagaggaaagatgagccatttaaattgctttttgtgtgttcctgatgactatttctaaaagaatgggcccactgagaagcatatgaggtaggagtggcccggttcttctcagggtttgatgatagaggaacaaggcagctgttttaatcaacacatcaggattaatgcctttaaaagtccaacatgcataaataacatggaacatgcagcttatataaagaaaagcattcttcatgggagatcaacaacatacaaagagtctttcagataatttatttgtgtgtgtgtgtgtgaatactttttttttttgtcttcaaacatcaatgctgtgaagacttcatcagctcctatataaagatgaggccctgaagttcctagggttaagcaggtagcaagactatataagctggtacaaggggaatgtggccaggtccattgctcacattatgtgtgctctatggcttctaggaagcttcctttggcagtaatttatttgtggtagtgatgaaacccttgctcaaaccagattggtatttactgagaaatgtcttccaaagcaagtgtttgacacacagcacaacctactcatttccttctagtcacactaaaaccttgagaaatgtttcctggatttgctttttcatctcagggaactgaggtgggcaatttatttaagaaaaaaaacaccccacctagatctatctatctatggagtctgaagcttgactccactttgcagcatgtttacaatgggctatatgcagcatgctaggtacatacaaaagagatagcatggctctggggtggaagactcggctttgggttagaaagacatgtggtctactgttgtgtgggcttaaaaaggccagaaatccattggattcagttgatagaattcaactcaaaagccttagtcaaaaagaatgattctgtggctacatgagttgagttctctaaaagaactgaaacaatacaataattatggcttaggagatgatctattagatcgaagccaagcttatatggcaccagaaaattttagttttgatgtaagcaaacagtagtagcacaagggaacccatgatgtggcagatgcacttgctggcaagaggcaaaagcaagaaagcagaaggtgaaaacttatgtttaggcaactttattggtgacaatttgcgtgtaactcctgaacatttctaggagacaatatgaggatgctaccaacagatgtggtagcatggacagggaaaaacttatagggactcaattatacataaagaactacaggaaactaagcagtgctgagagtgggaaaaaaacactcttccccagggaagagtacacccattgcttttatgtaacagcaaattgtctgccctaaaaatgtgcatacacacaagtaccattatacagtctaagcagattttaatgacatatttaggaatatatagatgcatacaaatacgtgtaacaattaaactaaaagaggccatgaatctaaaagaagatagggaacgggtgggtttaggaggtttggatggaggaaagggaaaggggagataatataatcataatcttaaaaatacaaagaaatacattaaaaaaaaaacaaggagctgaaggggtttgcacacccacaggaggagcaacagtatgaactaaccagtaccctccagaactcccagggactaaaccaccaaccaaaggaagcacatgctgggactcatggctccagctgcatatgtagcagaggatggcctagttggtcatcaatcggaggagaggcccttggtcctgtgaaggttctatgccccagaattggggaatgccaggaccaggaagtgggagtgggtacgttggtgagcaagggggaggaggttttcagaggggaaaccaggaaaggggataacatttgaaatgtaaataaagaaaatatctaattaataaagaaaagttagagctcataaaaccaaaaggcttaaaaaagcaagcaaacaaacaaacaaacagaaagaaacccagctttttcctcagagtacattattctgggactcagtgtctgggagatgtcacctactcttgggggaatgtctttccttggcagctaatccttccaggaaatatccttacagatatcggagccacatctcttagataactccagatccagtggagctgacaattaaagttaaccccctcacattgtcaaagctcagggtaagagttaacttgtatctctcctgttttcttgctctccctttcttcatgttcctatctctgtggtcatcttgtttgcttcatttgcttgtgattcccgtcaagaaaatgtaaacgtgatcccaaatgagatcttttgtacatctaggtcagctcgctaactgaatgctagactgtttatagcatctaatcccattggtccagagagacacactgaggagcaacacccaagggtgtcatatctctgaaggtggaatgaaagttgaggagttgattgacagtctcctggggtgacatactcacacacaaaaaagagtgaccatgcacaaaagccatgggaatgcagaagataaggaaatatctgtccaatatggaagcatcagttctctagctacaacatgctgctaagatttattttgtaatcttggttggaagtgtaaaggatactaaatggagcatcctcagcacatgtgaggtattcagtcaatagatgcgcctataattttccaactgcataccagccaagccacagttcaccaaaagatgtaaaaatcttaattcattccccattcgtgtctatttttaatatgaagcaacgagtcgtctttgtctggctcagttaaaaaattatccatttagtaaacaatggagacaggtccttgagatagaaatgaatcaaggtgagtctcagcccttgagactttcctaaccttgtgccatgagcctttatagtggtgtttaaatgttttctataagtctgaacctagaagcacaagtcccaggtgtagctcacttctgaaaactgtacatcatataatcttcagccttccttactggttctgaagtggtacaggctgttctaaatggatttgtctttcctgggcagactaacaagcctcttcacgtgacacctctacagcaattcttcagtatttatccatggagacaacatgaagctgattttttttttctggaatctagtgtaggtgtttagctgaaagctagacctgattatgacatttaaacacattggtccagatgtctaaaatgacacttttctgatttctttttagttgtatcctcagctaacttccctctgtactggttgtttggctatgggactctttatctggtcccatcagttgctggatgaagtctctcaggtctctttgatggtaattctgcttccagaacactttgcagttgggacaaactgtaggttgaaggttttgagctggggttagtgacccaatcccactacttgagatcttgcctggctacagaagatgcctggttcaggttccctgtccccattactaggagtctttgttagggttacacacatagattccatggagtttccattgctctagctttctaccttgtccctgaaatgcctgtttccagccatttctcccagtattttctcccttcctcactctgccacttgatccctcctgtttcctatcctacgagctccaagttcacctgtgaaatctcctctacttccacttcgcagggagatcattgcgttccccacacccctttgtccctccttgttactagtccctctgggtctgtagactctagcctgattgttgctgtatatctaatatccacttataagtgagtacataccatgtttgtctttctgagtctgggttaatttactcagggtatttttttttcctacttctatacatttgcctacaaatttcaagatgccattttaaaaattattttattaggtattttcctcatttacatttccaatgctatcccaaaaagtcccccataccctccccctcactcccctacccacccactcccactttttggccctggcgttcccctgtactagggcatataaagtttgcatgtccaatgggcctctctttccagtgatggccgactaggccatcttttgatacatatgcagctagagtcaagagctccggggtactggttagttcataatgttgttccacctatagggttgcagatccctttagctccttgggtactttttctagctcctccattgggggccctgtgatccatccaatagctgactgtgagcatccacttatgtgcttgcaaggccccggcatagtctcacaagagacagctatatcagggtcctttcagcaaaatcttgctagtgtatgcaatggtgtcagcgtttggaggctgattatgggatgggtccctggatatggcagtcactagatggtccatccttttatctcagctccaaactttgtctctgtaactccttccatgggtgttttgttcccaattctaagaaggggcaaagtgtccatactttggtcttcgttcttcttgagtttcatgtgttttgcaaattgtaacttataccttgggtatactaagtttctgggctaatatccacttatcagtgagtgcatatcatgtgagttcttttgtgattgggttacctcactcaggataatgccctccaggtctaacaatttgcctaggaatttcataaattcattctttttaatagccattgcttttaatagctgagtaatactccattgtataaatgtaccacattttctttatccattcttcagttgagggacatctaggttgttttcagtttctggctattatgaataaagctgctatgaacataattgagcaaattcttgtgataagatggagtgtcctttggattggtataactgggtctagatgtaggttgattctgaatttgctgagaagcagccatatagacttccaaagtggctgtacacatttatactctctccagcagtggagaagtgttccccttgctccacatctttgccagcatgagtgagctgtcacctgtggttttgatcttaaccattctgacaggtataagatggaatcccaaagtcatttttggtttgcattttcctgaactctggggatcaaacttgggtcctcttgcttttaagataaatactttacccactgacacattgtagagagaatatcttgtgcattgtatgaatgcatcgcctgtcaatttagaagcctatggcctatggcttaggtaggaaataaaggcgggacatcaaggaggcaggaaggattgtgggatagagccaggcacagatgatccatccaggaagatgtgagaagatgaatgcatggtacctgagcataggtaacaagccacgtgacaaaatgcgtattaaaataaatgcattattttaagttatgatcctagtcagagagaagagcctagctatatggccaaagtatttgtaaatatattttgattctgagtcttatttctgggaacattggactgggaggaagaaccaaagccaacttcaacaatctatcactcctctccacctctttccttttaaacataacttagttataattttgtttatgtgggaaatgtaccttgtaatctggtaagttcacacaaaggaatctctatacctcattcaattccatcccgtattaaatcagtgctacttttggaagtcttgtgtgggttacatatgaacatcctatccataagctttaacctcttcatgatggcatatatatttcttagctcttccccatggtggatgttcacactgcatagtaagcacactaccttttgtggtacatgttcacacatatctgctcatggaggtctgtgaggatgtctatgggctgcaagtcagggttcagatttctggattatagattacaattgtcttcattgagctatgtaccgagaattactttccaaacagattgccctggtctgtgcctccacagttggagctagctgctcctacatccccacatctcctctgagagaggattatctagcttgtttactttttctcattctgctcagttttaattccattgcttcagtttctatctctctgattacaaatgaatttgaacaccaatcccaagcctattatttcctcttctttattgattgtctgtttatataacttatggctgatttttttaatttgaggaagggtcctgacacttttctattttatagcttgcatttgtattcttgatatcattagattgattattttgatgctttcaaatgttacatgtgtctgttctgatctgtctttgattttattgaatgtaaatctataagttttataaaataaaatccctcaattctttgctttataacatctgtccttcaagtttttaatagtttctctactcttaagtcacaaagataatcttccatattttcttctgttaattttatagccttgttttgtatattttaatatctgcttccatttaatacaaatctatgttttgtgttttgtttttcttcaggagccagtgttaccagcatacccactcatctgtctgtcaagtaccagtgatggataacttgctttttatcatatcatacatttttatatttcagtaacaatcctcgccctctaccattgaattgcacccacgccactcattccttcatactctatctcagaattggtttagaaatccccagtctcatacctttgagacttattaattttcgtccctccttatacattttaatttttctaattattaggctgccattggaacttttggaaaatttgcattgatctcatggataaaattggtttgaaaagatgatgtatttgctgcagtattgcatgttttccaataaaatgcaaatcacagttgcactctgttttctacgttcgcttttatatttttactaatctgtatgtctgcacacacactcacacacatatggcagagagaagggaaaaagaagtgtctgtgtgtgcccattcatgtaagtgtgggtgcatatgttacaccatcagaatatggagggcaaggaacaactccaggtgccagttcttgccttctgtcttgtttgatgccataggcccctttgttcagccccatgtagagcaggctgctctataagcttctgaggtttctcctgtctccacctctcattttgctataggaattctgggattcgagaggcacacaattctaggtcttgctttacatgggttctggggaattcaagcataggtctttattgctcacatagcaagtaattttcccactgagccatttccctaaccttagccaataaacatctttggttgtcttcgtgtagatcttaggcatgtaattttgactgtcatcatagagtgtatgatatataatttttattcgtgttttacctgattattgataatgtgaaaaaatgccattgatttttctgagttaattttttatatagctacctactaaagcttctattgattctaatagcttgtgactctgttgcaatattttccttttgtctgttatatgtgattgcattatctgctattactgaccgtgttaactttgacaatatctacctccctgtttggtgacagtaggaagatgtgacctatcattgattcaactcagacagagaattaatgaaacatcaaagtattattgccattaaagtccaagttagtggacaacgatgttactggggttacttacaggagaataggtaaagggttgcttacaggaacataaatagctcagggcagcctgtcactgaaaacctaccctaacatgggtaataacttgtaagctggaactcgagagctcacagagtcttttctgtttggtaatccatactgctcacacataaccatggggagagaaaggctttgttaacttggtaagtttcagggactcccagagacttgtaagttgctttctccttcagtcataatggaccttcctttaaaacttcgtgagtcttaacagcttccttttataacttcctaagtcataaggagctgccctccaaaagagactgattcagttcacagaaaattgctacttaactcatccagtctagtttttttttcctttcataatcagaatctatatcttatttccaatcttaaaaaacacgtattttaaaactttctaaaagatatttactcttttttgagggtttaggtatatataccttttaaatagtcaagaatattatcttctatttttagttgtgtgttattttaatcaaacatataggttgatggtctgaggctatcactctgtctgtaaagtgctttctatacaaggataaagatatgacttaaatcacccagaatccatgtaagagctgagtatggtagtgtgtgtttatatcccataaatgagggggtgagacaggcagagatgcctagtattcactggtttgccagccgaagcttctctgtaagattagctccacctcccagtaagggactgtctcaaaagtcagataaaagcagctgggagtggtggcacatacctttaatccaagcagatctttgagttccaagatagcttgttcaagaaaatgagttccaggacagctgggcctacacagaaaagccctgtcttgaaaaatcaaaacaataacaataacaacaacagctacaggagcagcagtaactgcaataaccacatcatgtatggcagctgaggaccaacacccaaggtaatgttttggcctcatgtatacacacatgtaaacaatcatatacataaactcctcccctcctcagagtaaagattgagcttcatcaatatttttctgtccaataattgcatgattttctcttaagactatacccaattttctttaattgaaatcaccaattttctttaattatgggtcaggaatatgtaagcttgtatcattgtgaaaggtaaagtctttcaaatgtattttaattctttcatactaaaatgaatctcatatgtacctgaacatttaagttattcacatacatcaaggtcagagatagcttatgtgaatagactcctagtaacttaatgataattttagtatctattaaggtccatattagcaaagtgatttctaattttataggcattttgcttactctacaagtctttagttctaagttttagtcaattaaaaattatagttagaatatttctgatcatacaaagcacaaggcacaggaaatacataagaaagagtaaccttccctccagtccacatccattagctacccagttcccttgtcttacaatgaaggcaatgggagagttggtgagccttcataggtacgcaagcatcatgctcaaatgccggacaaaaatgatagtgaatctacttcttatgaccctgctttattcacttgtcaagatatcctggcaaccattcagttacatcaagagcttttctaatggctgctttgtatttttgtgccatgaaatcgtatagatctaggaaagatccatctcttcatgtgtgacttggttggtttagcagagttctactaatagacatatacattgtttgcagtcatttgttcgtatgaacatcatttcatgcatgtgtgagtatatttgtagaaaagattcttagatgcagaattattggtcccaaggcattacagatgtaattttcatagatttgtcaaattatcttctctttgtggattgtgtcacattgctgttcctagacaaatatccatggatgtgtgttttctctgcatttgtccctgcaaagaacatgttttaaaactatggcaacttatacacgaaaaccgtatttcttagcgaaataccattttatattcctggaactataaattaatttgagtttctttttaaatgctctgagtcattcacatttttcccctgggatgaatctcctgtgctaatttttctgttggatgggttttccttactgatttataatagatattttttccagtattaaatgtaagttaactcaagtctggtgatattgctcaatggcaggacactttcctagtagtctcaaggccctgggtctgataacacattaatataaagaaaatgtcagattgtttgcacccaacataatgttctttttacagttatttgatatttcatcattttacccataaaactttctggtttagtgtaccatgatcacgtgaaatttaaattaacctagggaatattaacattacattatgtaatttcactttatactttgaaatctttattcaaggcatatctgtgcatagtttaaatggtcaaactgcctttatattaaacagtgagtacagagccagactcccctctcacccagtagcttgcagttgaagccccagccccacatttgtgcattagcaacctctctcggtgctcatttatcctctttcctgttatctactggcttctcaccgaggaagatggtttaacttttcctgttctcctcatgaagcatcccatgggcatcatccccacccaccattctctctcttccaatagagtgatatcctaattttggttagatcaacagtcagtgttttcaatattttgactatgtaaatgccattcaaaactgaaccatgcagtaaattacgattattttccctttctgcacaactattatgttttccctgaagctaatatttgccgcgtttatggtttgtttgcttcgtttttatgtttttattactaattcagtcccagatctttgccaattatctacagctctcctccagatcctcagatgtcctgggtgctcttttcttcgcgttcatccccactgaaagccctcccaagttgctagcttgctctgctctcattgtaggcttccagtgtctggtacagtccatcaacccaggactgcccttctctctccacccatggatgctctacatttcagtcttagcttagtgttttctgttgttctcttgacttttctcagagaatcctgatgtccaagaggccaatgcatgaatccttcattcctcaatccttacatcaaactgatgattcaaggaaaatagctgctctctcctctcatgaaagtactgtcctttcagagttcagcagccacctttggttttttgttttgttttgtttttgttcgtttgtttgtttgtttttttggggtggggtttcgagacagggtttctctgtatagccctggctgtcctggaactcacgttgtagaccaggctggcctcgaactcagaaatccgcctgcctctgcctcccaagtgctaggattaaaggtgtgtgccactgctaccctgctacctttgttttaagaatcataaagctattaagatccctagccatggcatgctccccctctctgcccagactgctatcaatgttttccagttctgaaagttaataattctgcacatcaaggcatgtatgtgtatttttgtgcatgtacctatcaaatagatgataagctgcaagttccagtagcactcatacttcatgttcaggaaagttcttgaaaacattttttattccttttagcatctttagttgcatatgctaataatacaaaataattggttttcatacacatgtagagttctttgatcatattttcttttccctattgcccatatgtgtcttccattatcccattttccttcatagtgtttactgtctactttcttgggtgtgtgtgtgtgtgtgtgtgtgtgtgtgtgtgtgtgtgtgtatgtaaacatctgtgtctgtgtgcaggtgagcctacctggacagagactaatagagagttgtcttccatgtcacttctccatcttctttctttgaaacgttgtgtctctcattgaacctggatctccctgtttttcagaggatatctagggacctctggaattcttgtgtctctgcccctcagctctgtagtcacaggcacacattgctatatccagttttttataggagtgcaagggctctaaacttaagtcctcacatttgcacagctaacactttaagactttaaccactgagtgatctacttttgtgctttttttttttttttttttttttttggtaaggttatacacatgagacctctttcggagatcttttttacttaatgtggtgatctctagtccagccactatcctgcaagctatgtgattgcttatgaatattaattcattgtgtatcttctatgtgcattcatctattgttagacacctaagttggtccatagcgtggttattgtaaattactgctagagtaaacctgtgtattcaggttagcttgacatatctaaattttattccttcatttgtgaatcattctttcctttgtgttttctcttttctttctctgaaactttgggatgattccctaatacccctgtattcattttccagatatttatagtgtttcgctttgctttgctaagagagttcctcagctccctgtctctttttctgtttgacttttaatatggaccaccattcttttaatttccaagtgctctttattgtcttctggaggttccttttgttcacaggtttgcagtgttttcttctgtctctggggatgtttgtaatggtgttttctgtttgtagtggtcttaacattgaatactccattcccttccaattgctttgttctgcttgtttgttttgatcgctatctcttgtagttgatgcctctctagatatcccattctggtgagaaatggcgagacccagactaagacaagcctggcagggaggaggaagataaaagagtgacttaggaagtagagatctttgaggtgatcattagctgaaatagctagagagaaactgatgactatttttctacgtatttataagtcttagaggttggtaacatgacgcaagatagagtctgggaaaagtatgtagcaagggctggaggagtggctctagattcaagagtgcatttctcttggaggggacttcagtgtggttcccagcatccacttctggctgctcacaactgcctgtgctccagctccagggaccacaatgactgtggcccctgtggccactttcactcttgccaagtagcccactccagatacataatttaaaagtaagatatttatttcttaaaatgtttagcataggaaatcctgtgtatgttgtcaggggcacatggattgtttgtttgttttcttgtaaaagttgggcaaatgtaagcaattctgtgtattctgtttgcttggttctctgacaggacaataagcatgctgctccctgagcccaccccttccagcctagaccatagtgctgtgtatcaaactgtactctggagatacattccattgagcagaaaacactgggtcttactgaatgtcaatataatctacaaatacagcagggagaatagcctccatggctattggagaggaccaaatggtagacagacaatggtcacttagcagcagtaaatagaagatgtcccaccctctcagcatggagcattcatagcactgatatagcataaaaagagaatgggcaacaactgcaaacataggtaacatctgaacctttggttggcttgtgaatacaagtttatcaaagcacaataaaaatcccactggagtaggcagatgctccatgggccaaagatgacacatgaagctacaggagaaggcttcatagtggaggaggctaggatgtgcttctatgtgggcagcactgagaggcctccgtgcagtagctgtgtaaagcaaaccgtccttctgcctctctgtctaatagtataatatgatcaagagagccatatgtaagaacataaggattccctctggagccaattgtcccttccgctccacactgagcagtaatgttcccagtgatgacccaagttcatcctcatgtgactcgatatataatatttctgagtggctaattaattctgtaatcataggaatggcaattagcaagatgcttctctgattagaggcctgtggtcaggaggttcttacacacttgcatttactaaaaaggaagccctgtctttgtggcacttgttaatttctaccagcagggaacatgagatttatctgaaagaccaaacctcttcccttctctgtccctgccactcattcttacttaggaagtatttagaggacaacctcagatgtgggtctttatctttcacctcatttgagatgtacggtttctttaccatctgcaactatgcacacaaggatatctggtccctaagattctgggggaatctactgtctcccaccctcttcttactataggagcactggatttatagatctataaacccatgcctggccttagatgggttcagtggattcacactcagtactcatgcttacttgccaagaactttgcccactgagccattccaatggcttctcggcatcactatcaacacttaatcttataagaattatttcatctgcccaattagtaagcattacaatagacactttctgtacatactcagtctacagattgttatgatcagtttataggtatataatcaggagccctgaatgttcataaaatatgcatagccttgagaaatggcaaagcgcttacacctgggaatgaaagtatcactgacaggtatgctaaggccacccagggacgtgttagaacagaaggtggcataaaaattattgttaataatgttgcaggtagatagccttaagctcaagcatagagcttccaaattgccatccatctgccagtggatgagttcttaaatttcttggaaatactacttttgacttcagtaaactaagacttactccatggcattactattaggattagagagatagcttatagattctatacaactcctaggtgcttttttgttttgttttgttttttaaaagaaaatctgcctagcatacaggaagctctttcttatgcagtggtcaggtctctgcactattgctctttggcatacctagtggggtatttattctttctttgctttaagcctagtttgggaaatttggcttgattctctgagagaccgtgagaaccatactagccaattgtagaacatccccataagcctcctgctgctaaacagcatgggagtcagaggtacaggtgataagttattgacacccatggtgatgaagtgactcttagaagcccctgctatctgttctgaccactcctggtggtgagagagtacattttgagtctctagcttctagccctgccgtaaccaagaacatttcaaacctggccctggtgtggtgtcattgtttgcttcctattgctgtgataaacaccacgaccaaaagcaacttggggagcaaggatttattttaatgcttacagttcatcatgaaggaaaatccaggcaggaactgaaagaagaggccataaaggaatgctgcttactgtcctttgacctcagctcactcagctttgtgttttaatacaacccacgactgcctgcacaggaagagcagtgcctactatgagctggccacagggatggcagtacctactatgagctggaccctcccacatcaatcattaatcaaataaatgccccatagacctatctacaggaaattctcagatgaggttccctcgtcccagatgaccctagcttggtcaaggtgacaaactgctcaccagcacagtaacactcatcaaaatggacttgaagatacagccatcttggtttatggaaatggtattttgaagaattgtgaaaaactagtccagcaaaatggctcagccgggcaaagctcttgtaaggacaagtctaatgacttgggctcagcagaggttccctcatcccggatgacccaagcttgtgttaagttggcccctaaatcaacccagcacacacggaaatgccagtggaataaatacaaccgcacatgggtacttaccaccgccattctgaggtccagacttcctagtctcatacgttattctcttaatctgataactggctggggacaggatcccctccaagtatacgtagtttctattataagtatatttttactgagtccttgcaaatagtgctatgactttgggcaagttcattaaattctttttttttcttcctgtttcccatttgcatagatagaattagctacggggcaacttctcataggtactgggagagaattcactgaaataagaaaaaaaattacacaaagtgtttagctcagtacgagctgttctgaatgctcaaaaattattgatcactgtcgaactatttctgttcttagtttccttatgtttctggtgcggtatccccattttcagagaaacaattgaaacagattgatcacatgacactcataaaataagaacaatcacggctttgggcattgaagtccccattgatattgataattagatgtaacaagtcttatttaagagtcaccctggtcagcccatgttccctgtcccttcctctcccacagcccactttcttcttccttccactttcagcctctctctctctaatatctacttgccagagtttcaaaagaatcctcaggctagactctggtgtatcaaagcttcccagcacaggcaggaccaaggagtaaggcagagagtttctaacagtctcctttcctgtcctaaagagatttgttgaaaacatctgcctccccatctttattccaggtgagaactggcctacccttttcctacagtctccccagtcaggtgacctgcccttgggcattctatgagactataaagccatgcacagagaaaacaagaatgttcataaagatcattgagtagagtatggcttgatccaacttccagcttcagtcagatgagaggaggcagcttggctgctccttggatggcatttattacactcacaagtcaataatgatcaccccagtgatagaagaagagtttgaagaggcctatgagcctaccagtgtgcaaacaatgacacaaggatggaaggaatgggcagagtggacacgtgaccttgaatcctcaccgtgaccctgcagtaggtccagtgggagccatcacattttacaaacaggaaagccaggccgactaccatcggatcccattcacgtaccaaacccacccagagccacacagcacactgcgctgctttccctgggccaggctacctcctttcttacttcccagtttggcaaccaactaaaaggcatctggaagccctatcagctccctctcaggccttcagaaaaatgagcaggattccagaaggggtgctacagagtctgtccaagaaagcaccaaggctgggagctggcagcacggctaggtttgattattcacgtctacagaggaacactgacttggtggaccagaccatccgaaaattcctctacttgatttttctggaatcaaattaggctggtgaataggccagtggcgttttcatcaatttcttagccttcccttggaactgagcctgatttccttggcctcccgcaaggccgcctgctgtttactgagcaaacccgctcccagcaccagctctgcttcagtaatgtggcaaggcaacgtggcagagggaagattacaggtattacaggccatttaggatcatttagaatcgagctgttttctgagcaggcaattaatccacttgcattaaagggagctgctggattcctgcacctctccctgagttaagaaggggatttggaggccttgttcactgacttgccaactggctctggagctcagtgaggtctcttcctgggggaaggaccactcccctgtacactgtagatctatgctggggaaagggtattgtacaaactgataaaaactgacgacacgactgttccatggtgtgtgaagattttcattgtaggtgtgtgagagacaacagcacgaagcctctgaaagagtcaagagcagagaagaagtgcactgagcatggtcagcagaagggacatgaccagggctatgtggtagagaggacagaatggcaggagacagttataatagagagtgtgtagtagagtagcaggggcctgggagaccaagaagctgggggatgggaaagtccaagagaccagcatagaggctttgaaatatacaagtgcttgtgagtagggactgtactatggacttgtttatgctgatatgtattacaggcatatgttaattggtaagccttatgtcccttttgttggaggtaaagaaaatgactccttttggtagatgggagctaaggaaggaaattcctaaggaaggctggcttttatctaaccactaggaatcctactccagtgtaggtggagctcgtttctgcatacttgcactggttttgccttcaaagggctcaggctttatctggagcccatcacttgctaagaataagaacctattagaatcttggaatagaagtttggaggaatgttttttggttggggagattagtgatttcattggtactgttgttctataaacatagatgaacatgctttgtcttcccacaacataagaatatactgaatatcaatcacaaggtgctatgatttcaaaggcaactgtttacccagtagtcctccttttcctttgtaactcagccaacaagatcccaggtcctcgtattccagtcttaattagtaatattaactttcatctttgatcttccatttgcaaaagggcccaaaatatgtgagaagtaaatggaatatgtacatatcaggcagtacatttatcatttgtctatctgcctgtctgttatagtatagatttaaaaaaaaatgcttaccaaggctacatgggctgttagaaatgtaagtgaagtttgtattgggaaggtaaagaaaccaaaccatcttcagaatagagatggcttctcttctgtcagacagtagagaatattgtggaatgagagtagagagtgaaggtacagggataagtttagccatgaagaaaaagagcaggaacattccaggatggaatgtgcaggtggactgatgggttgactaagctgttgactaagctgtgtcaacagcagggatccctgtgcctagaacagtctggagttctctgcctgttggcatacaccagatatcagatgatagatcattacaggggctgttgtcattacagtcatggatgtctaactctttatgggatcaaagggaagaagttatacttttccgtcagcctagtgtgtctgataagtacttgggtctggtttctctggtataatttaatatactcctgtagccttacagtcttgatacacctgaagtttatggggtaactctctttctattcctaggagtaagtcatttatctgcctgtgttgcatgggcggttctggacagatgatttttgttgcaggtcagtccaggtactcagtcaccctccatcctcaaaatggaatcactggctgctggtaaaacagtctctcacaccgtggctcagtctgggaaaaattgaaacaaagcagtcttctatacaatatgaggtaactaacatagagacagtcataacccaatccaagcaggtaggatgggaagaaataaacatcctgctttggggcgttctttcatttaatatggatctggacatggcacatgtggtccctagagggtttctgcaattatatcctccttgaagtcctactatgggttgaacatttgcacctccttctatattaaccttacaagttatgacataaggtaggaactgaagagatggaggctaagacttaaagaatgtaatgaatttatacttaagaccatgaatccatggtacctagttctacaaccacactattcacatcctccaaagatttgcatcaggagatttgacctttatgctcaggcaacacatagacaggtggtcatactgttaagcaacatcactttcttctcctagccttatctttccccaaaccaagatatacattacctggcatgccatccacagtgagaggctgtgtgccacatcaacctgagtccattgctactcagtggatagagcaagcttggctgaattcaccctccccctttttgtctccatttcctttgaagtaccattggagggctggtctccatgagggctgaggctgagcagaaggactgtggaaggcatcacactatacctactataaatactgtcgtcttagagggggtatacatatccctgcccactcctgaggctacgagcctttgcttctgtacatggccttcctttctgcattgacccacagtctggaatccagtgagagaaatttgcttgcatggttgggtatatcctaaaatgaaacttctgtggcagaagccaaagggcctggaagccagtttatatttgctgactgttcaagacaggctactgaaaactttgctaacatcctccccagtgagtcagggctatctgctaggcctaagtaaaaggaataatcaatttataggtgttgcctttctttcccaatttctggtgatgctattttgcctattcaaatttcgtcagtacatggatgaccctccgtaagtaaattttcaattttatctttgtgagaagggaatacacatatagaaaattctcacatttcatgtcatcatatcctgccattaaaagagaaagcttctcctcttaagacctcaggtggtcttctgaagtccagtacatatcaaggtctctttgactttcaaattttaagttactgactctttaaattcaaacaaagaaacaagcaacaacaacaataacaaaaacaacaacaacagcagcaaaacccccacttcctagctaagggaggatcaaatctccctgccaccaataggtagcgattggagccatagctgtccgtagccttggggaatggactccttagcttctctgtgagacatttcttatgtttgggctggcttttgatctatgggtctctgtgctaagaactgttacaatgaaaggtcttgggaatcattggcatccggctatcccagttcttgttaatacacatacacacacacacacacacagagagagagagagagagagagagagagagagagagagagagagagagagagagagagagagagagagggagagagggagagagagagagagagagagagagaaagagagagagagaaaaacagacagacagacagacacacagacacacagaaacagacacacacagagacactccattaggttacactccattctcaacagatcattagcagggtctccatatacagttacttttaaaacagatgccagaacagtgtccttcattctctttccaataacttagtgaaatgcattttcatgaatgtgaacaagaatacaggaggacattcaagagtttcaattttccttttccatccgtgacctcataaactctacattcctaactgtatcccaagaactgcctccctttcaaagcctttggctaaatctccaggctaagctaagcatggcagtttatacctccatcaatcctgagtatattccactgtgatgatctgtgtcttctgccttcctacaagttccacattctctttgcttagaaagcattatacacagtgtctggcatgcagcaggcaagttgagcaatgactggtaaagaacttagaaaatgctgcacggactacttggcttgtccatgtagttttaaagaaggcaatcatgaaatgtatggtctccctctagagaagtcctctttcctagcttcatctgcctcattgcttcagtgaaaatgctttgtcaacctttggataagccccctcttgtcgtgaattagataaaaccattataattttgtattgtgtagcagtgttttcttcagtaatggatcatatgtatggtgaaagccccacaagattatactgccttgtaaacacagaggccctacccatttatataagtgtattttgtgacatcggcacattcggtgatgcagtcttcaggatgtagtcttatctcatgactatgatgattagaaacaagcagcagtacctgtcgacctaatagcttttaaggacaaggaatgttttcaggaaatttgtttagtagcctgtgctagataaagaaaaagagggggtgtgtgggcctggggagagggtaccactggtaaaacactgcctcagtttccattccgttaagagggaatgtctaccaccatgtaaagctcttgatggctcctcagtaaacatttctagggtgtaatttataaagtaaaaaacagtacaaagctaacaaaagaatatagggcttatcaaccacattacaggacaaggcctctcttttagaagagttggccagcacaaaatactcagtgtgttgtggtgtgatgtgtgtgtgcgcgcgcgtgtgtgtttgtggagaaagattataatcaaaatattttgtatggatttttaaaatatatttttaaaatgatagtttaataacaaagtttaaaaacgaagttttttgtttgaccagagtaagacaaggtatctgagggcaggagtattgataatagaaaaaagttcagttagaattaggaagaagaaacaagtcagctctgcttttcagtcatagacttttctaaaatgtttcctatgagagcttggcagggcagggataataaaaggatccaaaaggcagctgcaatatgacatactgatgactgacagagccatagtgggtagaatccaagtgtatggggggaaaatcagggcattgagactgacagatgagacactttccaaaagcatgagctaaactgccaagtgtgtgtgtgtgtgagagagagagagagagagagagagagagacagagagagagacagagagaaagacagagagaaagacagagagaaagagaaagacagagagacagacagaaaggaagatatgagaaatagagcaagagagacagagtgtgacagatagctaggcaaagagaaagacagagacagaaacagacagagacagagacagagattaaccattagaaatacttgaagtatggagagttaagccatactgtggctctattttttgtgcttatgttttagatatttaaatgattagcccatgaggcagcaaattgggagcaaatgctacattaaaggcatattcagttatcactgaattgtaatataaatagtttatagaattggtcattctgaggatagaacttagaattatctatggcatagtaatgatctggctcagatacaaagccaggccaaggcattgggaatggaaagggctgcgagaaacataatggcttcagacagttgactttaagagctgttatttgccacaaaaatatctaatcatccatttatccatttatatagcatgtacatgccaaacacccactgtatgccagccactggaagttgtttgtgggatatatgtagtgaacttaaatcaaggcaagatgctcttatgctataaacttttcagaaactgaccaagtaccagacatccattatatgcgttataaagggtgaattagaaagatgaataataaagaagctttaaaagacaaaattgtgagactggaaggatggttaagtaattaagagaacttgctgctcttgaagaggacccaggttcagttatcagcacacacatggtgtctaacaactatctatttcttcagttcttggtgatctgattccctcttctggcttctattaacattgggcgtgcaagtagtacacagacattcatgcaagcaaacactccttttgaaaaacaaaatatgaaataaagacattttaggcaaaagaaactaaatatacaaagatctcagagctggcaggaacatgacatattccagtaataatgagcacagcggttggagtgtagtttgcaatcagaggtccagcaggaaccaactcacgggccttctagatgatgtggaagattttgcccctcacctatgaatgatggaaaacattggaatattttaagcaagacagcctcagagctttgcatttaaaaatattctatactctatcagctagaacttggaattcattttttatccatagaaataacttaataaatggtagctctgggaagccagaataatgctattagcacaatgtatccagctaaacagcctactgaaaagcttggctttgttgccaaccaccatttataacttagtttctataggaaaacgcattccaaattccagacaacctaattacaaatgacattttttgggacagcctacaatctacttagactggtgaaaagactcccaacattttttcatatcaaaggttgttaagaaaggtgagtaacagacttctaattttgagatgctggaggaacaagccctgtgcccccttctgctctctgaaattaccactctataaaaaggaaaggactagaagaaaggaaattgaaagtattaaggtaaggcaaaaaaaaaaaaaagtattgtgctggacgatggctatgctcaagtgctcacataaagggtatggttgggagctgaaagaagagcactatggccctagactctaatgatttcagcaggacagattacaagactggtattttaccctgagaagccaagtcctataaggtgggtttcagaggccacataggaattgaacagcactttcatacaatttagcataacagaaaattaacgggttaatccaataaagagccaaagagccaggctgctattgtcttcagggtagaagggattgagttgtttgtttgtttgtttgtttgtatttgttttcattgattttattttttaattttttaaacatatataagaaataaatgtaataaaccaaatacatggacaaaaaaatacaagaatcacatgatcatctcaatggaagcaaaaaagaaaaacatctttgataagattaaacatgcattcttagtaaaagccctagaacaagtaagactgtaggaaacatattccaacttaataaaggttatgtatgacaaactcatggctaatatcatcctaaatgaataaaaaacattaataagcctcagtaaaatcaggagtgggagaagtctgcccactatccctacaggtcatccgtgtgattgaagcattagctggagcaataaggcaagagaagggatacaaatgggaaaagattaagtcaaattattttcaattgaagattatattaccttatacccaatgttcccaaaatttgacctgaaaaattgtagaaattatcaataatttcagaaagtattatgatacataattgacttaccaaatttaccagtcttaatacatatgagtacaagcatgctaagagagagatcatggacatgctcctcttcccagtttctcaactaaaggaaaatatttagaatatacataacaaaagaggtttaaaaaaaaccctctacaatgaaaactttaaatgtgtgaagaaagagattaagaaacctactagaatttgaagacctcccaagcttacagcttggtaaaaattaatattgtgataaaaagaccttcctaccaaaacaatttactgattcaatgaaatcacaatcaacatcctcatctcattcttcacataaatagaaagaaaatcttcaatttgatgtggaacaacaaaagacccagaataaccaattagccctagataagtgtttgtttctatgcattttgcctgttttaagtgctaagatcatctgtctatgacccccaacttttatatatctgtttctaatgagtcaattttgttccatattagaatggctactccagcttgtttcatgggacatttgcttggaaaattgttttccaaccttttactccgaggtagtgtctgtctttgtcactgaggtgcgattcctgtatgcagcaaaacgcagcgtcctgattacgttcccagtctgttagtctgtgtctttctattggggagttgagtccactaatattaagagatattgaggaaaagtgattattactacctgttatttttgttgttagaggtggaattatgtctgtgtggctatcttcttttgggtttgttggaagattaccttcttgctttttctagggtgtagtttccctccttgtgttgctgttttccacctattatcctttataggactgaatttgtggaaagatattatgtaaatttgtttttttttaatggaatatcttgttttctccatctatgctaattgggagttttgctaggcatagtagcctgggctggcatttgtgttctcttagggtctgtatgacatctgcccaggatcttctagctttcatagtctctggtgagaagtctggtgtgattctgataggtctgcctttatatgttacttgacctttttcccttactgcttttaatattctttctttgtttagtgtatttggtgttttgattattctgtgatgggaggagtttcttttctggttcagtctatttggagttctgtaggcttcttgatgttcatgggcatctcattctttaggttaggtttcttctataattttgttgaagatatttactggccctttaagttgggaatctttgctctcttctataccttttatccttaggtttggtcgtctcattgtatcctggatttcctgactgttttgggttaggagctttgtgcatttctcattttctttgactgttgtatcaatgttttctatggtatcttctgcacctgagattctcacttctatctcttgtattctgttggtgatgcttgcatctatgactcctgatctctttcctagattttctaactccagagctgtctccttttgtaatttctttattttttctatttccatttttagatcttggatggttttgttcattttcttcacctatttgattttgttttctcataattctttaagggatttttgtgtttcctctttaagggcttttagctgtatacctgtgttctcctgtatttctttaagggagttatttatgtccttcttaaagtcctctatcatcatcgtgagaagtgatttttagatctgaatcttgcttttccagtgtgatagtgtatccaggacttgctgtgttgggagaattgggttctgatgatgccaagtaaccttggtttctgttgcttatgctcttacacttgcttcctgccatctggttctcaatagtgatacctgtctttgctatatctgactggagaccgtccttcctgtgatcctggttgtgtcagaactcctcagagtccagttgtctctgtgatcctgtaattctgtgatcctgtgatcccgagatcctaggtgtatcagagctcctgggagtaagctgcctctgggaccctgagattatgttgtgaccaagcctctgggatcctgggattctgagtgtattagaaaatctgggctcagcctcagcagcagcggtcgccatcttggttccgggactcagcagaacttaggaaattagtctgaacaggttagagggtgcgccagagaaccggacagcttctgggaccggcagaagcacagagccgctgaggcagtaccctttgcaggctgcagacagccagccaccgtccggaccagaggacaggtgtccgcctggctcgggaggcggcctcagcctcaggagcagcggtcgccatcttggttccaggactccctggagcttaggaatttagtctgcacaggtgagagtctgcaccacagaagctgacagcttctgggaaatgccaaagcaacacagcttctgagaaaggccctgttttgggccttcttcttcgaccaggaggaggtccaaaaacaagatatctgcgcaccttccctgtaagagagcttgccagcagagagtgctctgagcactgaaactcagaggagagaatctgtctcccaggtctgctgagagacggtaacagaatcaccagaagaacaatctctaaacagagtcaactataactactaactccagagattaccagatggcgaaaggtaaacgtaggaatcttactaacaggaaccaagaccactcaccatcatcagaacccagcactcccacttcgcccagtccagggcaccccaacacacccgaaaacctagacctagatttaaaagcatatctcatgatgatggtagaggacatcaagaaagactttaataaatcacttaaagaaatacaggagaacactgctaaagagttacaagtccttaaagaaaaacaggaaaacacaatcaaacaggaagaagtacaaacagacaaagaggaaaaaacatacaaacaggtgatggaaatgaacaaaaccatactagacctaaaaagggaagtagacacaataaagaaaactcaaagtgaggcaacactggagatagaaaccctaggaaagaaatctggaaccatagatttgagcatcagcaacagaatacaagagatggaagagagaatctcaggtgcagaagattccatagagaacatcggcacaacaatcaaagaaaatggaaaatgcaaaaagatcctaactcaaaatatcnnnnnnnnnnnnnnnnnnnnnnnnnnnnnnnnnnnnnnnnnnnnnnnnnnnnnnnnnnnnnnnnnnnnnnnnnnnnnnnnnnnnnnnnnnnnnnnnnnnnnnnnnnnnnnnnnnnnnnnnnnnnnnnnnnnnnnnnnnnnnnnnnnnnnnnnnnnnnnnnnnnnnnnnnnnnnnnnnnnnnnnnnnnnnnnnnnnnnnnnnnnnnnnnnnnnnnnnnnnnnnnnnnnnnnnnnnnnnnnnnnnnnnnnnnnnnnnnnnnnnnnnnnnnnnnnnnnnnnnnnnnnnnnnnnnnnnnnnnnnnnnnnnnnnnnnnnnnnnnnnnnnnnnnnnnnnnnnnnnnnnnnnnnnnnnnnnnnnnnnnnnnnnnnnnnnnnnnnnnnnnnnnnnnnnnnnnnnnnnnnnnnnnnnnnnnnnnnnnnnnnnnnnnnnnnnnnnnnnnnnnnnnnnnnnnnnnnnnnnnnnnnnnnnnnnnnnnnnnnnnnnnnnnnnnnnnnnnnnnnnnnnnnnnnnnnnnnnnnnnnnnnnnnnnnnnnnnnnnnnnnnnnnnnnnnnnnnnnnnnnnnnnnnnnnnnnnnnnnnnnnnnnnnnnnnnnnnnnnnnnnnnnnnnnnnnnnnnnnnnnnnnnnnnnnnnnnnnnnnnnnnnnnnnnnnnnnnnnnnnnnnnnnnnnnnnnnnnnnnnnnnnnnnnnnnnnnnnnnnnnnnnnnnnnnnnnnnnnnnnnnnnnnnnnnnnnnnnnnnnnnnnnnnnnnnnnnnnnnnnnnnnnnnnnnnnnnnnnnnnnnnnnnnnnnnnnnnnnnnnnnnnnnnnnnnnnnnnnnnnnnnnnnnnnnnnnnnnnnnnnnnnnnnnnnnnnnnnnnnnnnnnnnnnnnnnnnnnnnnnnnnnnnnnnnnnnnnnnnnnnnnnnnnnnnnnnnnnnnnnnnnnnnnnnnnnnnnnnnnnnnnnnnnnnnnnnnnnnnnnnnnnnnnnnnnnnnnnnnnnnnnnnnnnnnnnnnnnnnnnnnnnnnnnnnnnnnnnnnnnnnnnnnnnnnnnnnnnnnnnnnnnnnnnnnnnnnnnnnnnnnnnnnnnnnnnnnnnnnnnnnnnnnnnnnnnnnnnnnnnnnnnnnnnnnnnnnnnnnnnnnnnnnnnnnnnnnnnnnnnnnnnnnnnnnnnnnnnnnnnnnnnnnnnnnnnnnnnnnnnnnnnnnnnnnnnnnnnnnnnnnnnnnnnnnnnnnnnnnnnnnnnnnnnnnnnnnnnnnnnnnnnnnnnnnnnnnnnnnnnnnnnnnnnnnnnnnnnnnnnnnnnnnnnnnnnnnnnnnnnnnnnnnnnnnnnnnnnnnnnnnnnnnnnnnnnnnnnnnnnnnnnnnnnnnnnnnnnnnnnnnnnnnnnnnnnnnnnnnnnnnnnnnnnnnnnnnnnnnnnnnnnnnnnnnnnnnnnnnnnnnnnnnnnnnnnnnnnnnnnnnnnnnnnnnnnnnnnnnnnnnnnnnnnnnnnnnnnnnnnnnnnnnnnnnnnnnnnnnnnnnnnnnnnnnnnnnnnnnnnnnnnnnnnnnnnnnnnnnnnnnnnnnnnnnnnnnnnnnnnnnnnnnnnnnnnnnnnnnnnnnnnnnnnnnnnnnnnnnnnnnnnnnnnnnnnnnnnnnnnnnnnnnnnnnnnnnnnnnnnnnnnnnnnnnnnnnnnnnnnnnnnnnnnnnnnnnnnnnnnnnnnnnnnnnnnnnnnnnnnnnnnnnnnnnnnnnnnnnnnnnnnnnnnnnnnnnnnnnnnnnnnnnnnnnnnnnnnnnnnnnnnnnnnnnnnnnnnnnnnnnnnnnnnnnnnnnnnnnnnnnnnnnnnnnnnnnnnnnnnnnnnnnnnnnnnnnnnnnnnnnnnnnnnnnnnnnnnnnnnnnnnnnnnnnnnnnnnnnnnnnnnnnnnnnnnnnnnnnnnnnnnnnnnnnnnnnnnnnnnnnnnnnnnnnnnnnnnnnnnnnnnnnnnnnnnnnnnnnnnnnnnnnnnnnnnnnnnnnnnnnnnnnnnnnnnnnnnnnnnnnnnnnnnnnnnnnnnnnnnnnnnnnnnnnnnnnnnnnnnnnnnnnnnnnnnnnnnnnnnnnnnnnnnnnnnnnnnnnnnnnnnnnnnnnnnnnnnnnnnnnnnnnnnnnnnnnnnnnnnnnnnnnnnnnnnnnnnnnnnnnnnnnnnnnnnnnnnnnnnnnnnnnnnnnnnnnnnnnnnnnnnnnnnnnnnnnnnnnnnnnnnnnnnnnnnnnnnnnnnnnnnnnnnnnnnnnnnnnnnnnnnnnnnnnnnnnnnnnnnnnnnnnnnnnnnnnnnnnnnnnnnnnnnnnnnnnnnnnnnnnnnnnnnnnnnnnnnnnnnnnnnnnnnnnnnnnnnnnnnnnnnnnnnnnnnnnnnnnnnnnnnnnnnnnnnnnnnnnnnnnnnnnnnnnnnnnnnnnnnnnnnnnnnnnnnnnnnnnnnnnnnnnnnnnnnnnnnnnnnnnnnnnnnnnnnnnnnnnnnnnnnnnnnnnnnnnnnnnnnnnnnnnnnnnnnnnnnnnnnnnnnnnnnnnnnnnnnnnnnnnnnnnnnnnnnnnnnnnnnnnnnnnnnnnnnnnnnnnnnnnnnnnnnnnnnnnnnnnnnnnnnnnnnnnnnnnnnnnnnnnnnnnnnnnnnnnnnnnnnnnnnnnnnnnnnnnnnnnnnnnnnnnnnnnnnnnnnnnnnnnnnnnnnnnnnnnnnnnnnnnnnnnnnnnnnnnnnnnnnnnnnnnnnnnnnnnnnnnnnnnnnnnnnnnnnnnnnnnnnnnnnnnnnnnnnnnnnnnnnnnnnnnnnnnnnnnnnnnnnnnnnnnnnnnnnnnnnnnnnnnnnnnnnnnnnnnnnnnnnnnnnnnnnnnnnnnnnnnnnnnnnnnnnnnnnnnnnnnnnnnnnnnnnnnnnnnnnnnnnnnnnnnnnnnnnnnnnnnnnnnnnnnnnnnnnnnnnnnnnnnnnnnnnnnnnnnnnnnnnnnnnnnnnnnnnnnnnnnnnnnnnnnnnnnnnnnnnnnnnnnnnnnnnnnnnnnnnnnnnnnnnnnnnnnnnnnnnnnnnnnnnnnnnnnnnnnnnnnnnnnnnnnnnnnnnnnnnnnnnnnnnnnnnnnnnnnnnnnnnnnnnnnnnnnnnnnnnnnnnnnnnnnnnnnnnnnnnnnnnnnnnnnnnnnnnnnnnnnnnnnnnnnnnnnnnnnnnnnnnnnnnnnnnnnnnnnnnnnnnnnnnnnnnnnnnnnnnnnnnnnnnnnnnnnnnnnnnnnnnnnnnnnnnnnnnnnnnnnnnnnnnnnnnnnnnnnnnnnnnnnnnnnnnnnnnnnnnnnnnnnnnnnnnnnnnnnnnnnnnnnnnnnnnnnnnnnnnnnnnnnnnnnnnnnnnnnnnnnnnncaaaagacccccgtccagtaagacaaaaaggcccacccaccagattgggaaaggatctttacctatcctaaatcagataggggactaatatccaacatatataaagaactcaagaaggtggacttcagaaaatcaaataaccccattaaaaaatggggctcagaactgaacaaagaattctcacctgaggaataccgaatggcagagaagcacctgaaaaaatgttcaacatccttaatcatcagggaaatgcaaatcaaaacaaccctgagattccacctcacaccagtcagaatggctaagatcaaaaattcaggtgacagcagatgctggcgaggatgtggagaaagaagaacactcctccattgttggtgggattgcaggcttgtacaaccactctggaaatccgtctggcggttcctcagaaaattggacatagtactaccggaggatccagcaatacctctcctgggcatatatccagaagatgccccaattggtaagaaggacacatgctccactatgttcatagcatccttatttataatagccagaagctggaaagaacccagatgcccctcaacagaggaatggatacagaaaatgtggtacatctacacaatggagtactactcagctattaaaaagaatgaatttatgaaattcctagccaaatggatggacctgtagggcatcatcctgagtgaggttacacattcacaaaggaactcacacaatatgtactcactgataagtggatattagcccaaaacctaggatacccaagatataagatacaatttcctaaacacatgaaactcaagaaaaatgaagactgaagtgtggacactatgcccctccttagaagtgggaacaaaacacccttggaaggagttacagagacaaagtttggagctgagatgaaaggatggaccatgtagagactgccatatccagggatccaccccataatcagcatccaaacgctgacaccattgcatacactagcaagattttatcgaaaggacccagatgtagctgtctcttgtgagactatgccggggcctagcaaacacagaagtggatgctcacagtcagctaatggatggatcacagggctcccaatggaggagctagagaaagtacccaaggagctaaagggatctgcaaacctataggtggatcaacattatgaactaaccagtaccccggagctcttgactctagctgcatatgtatcaaaagatggcctagtcggccatcactggaaagagaggcccattggacacacaaactttatatgccccagaacaggggaacgccagggccaaaaagggggagtgggcgggtaggggagtgggggtgggtgggtatgggggacttttggtatagcattggaaatgtaaatgagctaaatacctaattaaaaaaaaattaaaaaaaaaaaagaactagtattgaggaagagggataagctaggaccatgctatggaaattggcagagcacagcatgttctttgaatctcacaagttgtatgtaagggtggggaacagatagagagcagatggtgaagactctcctcagcatgctaggctgtcagccttcatcctggatggtagaggtcctggtagggactagcagcttcaaaacatccctatctgcgccttctgctaattgtcagccctgtgacatcatcattgtttggtgcttttataacactttaaaatgtctgtggttctggacagctttgtcagacctattctcatataaatttccgttttttagctataaaaaaaaaaaaaaaagaaaacctggaagtggagcttcctctgggtattgtgggactggctgcagagttcatgcccaagatctgtggaagggattgagtcttctggcattgacctatgctggataaaataacttacatagacagccagtattttatatcacaagggattttgttatgaagcaggaggttttttttacaagtttagagtacatccctacaacacttctaatacaaccatcagcagttaatgcaaatagaactgtatttgatggttagtgataataattataattaaagaaacagatacaggtcctacacaggataacacaataaaattgaggaggaaatgcatggaagacaaaatctgactgggaaatattgctgtagatgcaatgaaagctgtgaccaaatttatcaccattaatttaaaatgaaggctaagcagttacctctttatacacacacacacacacacacacacacacaccatagatgaagatccagcaggcaataaaacaggtttagcttattcagagctgagaaggcatagaaaaatcaaaccatcacattagtgaacatgcatattgggaaaattacagaagaaaactagagatgccccaatatcacaaaaatcttcagtaacagcaaggaaacgaaacagaaataaaaacattgacaataatttgagaaaaaatgatagatgcagaagacaaagaaaatctgccacatccataattatgttcccccaaagagaaaaataatctgaacaatgtaatatcaaaatatgcacctgcacgtgaaaggtgcagtattggctgtaatagccacataagtgcagtccccatgaataaatttggtaaaattattaggaaataaacttcagccaaaagtagataaatggatttaacattctagcccctgctttgttttgttttgtttttgttgttgttatagtttctccattcaaaaaagagccacaagtgttggaattataattatagaaattgtccaatttatttccactgtgatcaattctgaaaaccatatatttaaaaaaaaatccctgaagcaattacccaatcttacaaatggtagaaaatggcaagtgtgcttttaaagtgaataattatgcctaggtaataaaggagatattcagaggacaaataaaatagagcagagactggagaactaaaggaacagaaaccagagcctgagtttcagaaacaggggatataagtactgccaccatcagtacaatgtattcactttaagtgaaataccccaagtgaactaccaaacaggcaaatatgcattaacttaaataaagaagaaagatgaaatgatagacctagtgctaataagacattttaaaggaatcacatataatagctaagaaattattaacttagtagacatggaaatgaaaagattgagatacatacaagaagactattaataactcctgaagtgaaatttaaaattcatcctttaaaagatatatattatttttagtgatgtgtgtatgtatgtttgtagtgggtttgtgcacgtgagtgtgggatacctgtggaactccaaaaggggtgtcagatgccctggagcaggagcgatgtgtgtttgtgaactgtctgacatgggtgttgggaaacacactcaaatactctgcaggcatggtatactctcttaaccaccgagccatctcttcagccccccacacagcatcgaataaacactgaatatgctcagggagacacaaatagaaaagagaaagggaacataagcaaggagcaatagtgaaagggatgtggccaaggacttctttgaacttatggaagacagtatttctgaattcaagaagcccagttgatctgaagtaggatgaattagaaacagcaaaaagatgcctacacttactatagaaaagctcaacgcatcccaggaatcttcaagaacagattggaaaactccacttcgctgtgaaatcaccaattcagatcagagtcagtttcagcagtgaatgctgggaacagcaaacaagctgcagaaagagcaggcacaacagcaagccttcacatggatatgcagtggagcatatgggttgagaggaaacagtctgaacaataaaaacacaagaagtgacttccaagagcccatcactgtaacagattcacaggatgactagatgggagagtgctaatctaacacacaagacaggcataagggcaagaaatgatggtgagcaaggaaaccgttacagactatgtgaatttcaataaactgtgtgaaaaatgcagtaatttgtaacagggtatatgcatgtacaggaaaaaaaagtgaaattaatggtaacaatatgcatgtaaagtgggagagagttaattacatttaaaatgtctaagattcttgagttgtttgcaatgtattgataatatttgggctttaaatgaaatgcatgtagtacaatattaaacagggtcatttagattagtttcccaaagaagaaagaggcattgaaggagatgattggaaaattacataaaagttgaagaacaagcagaatagcaaaatgagatgaagaagcaattccaggtttaccagtagccatactgcacatctctatccttcttttaaacttagccattatcagagatgtgcagaaaatgttttaagtaagtatttttatggataatgtcattagtgattttgtttcaatttcccaatattatctcctacaaacaaactaaagaaggaaggaagaagggaagaagggaagaagggaagaaagaaagaaagaaagaaagaaagaaagaaagaaagaaagaaagaaagaaagaaagaaggaaggaaggaaggaaggaaggaaggaaggaaggaaggaaggaaggaaggaaggaaggaaggaaggaaggaaggaagagaaaataaagaaagtaacccagagtacatgctgtctccctcaaataaaattattgatttaaccattgataaccagagggcaatctctgagacatcaaaacaaaagccttgggatttaaaagaaaactacattatttgtatttccagatgaaaaggaccagatccttttcaatgaagagggtccaattataaagaggtccatggatctggagcctgtgcagtatcaggagtgtgtagagaggacaggtaagcatcaaagcatcttatggacctgggaaaaaagaacccatgtgtccccactgacaacacaaataacaagttcaaggcagagtgatggtgcatgtctatagttccatcacctgagaggatgacatgggacagtcaagagttccagaacagtctgggccacagagtgagataggtctcaagataataaatattaaataatagtactaatagtagtagtagtagtagtagtagtagtagtaattaataaaaataagagaaagaaatagaaatcaagtttgaaaataatggctaccactgagagagatcttgcccatgacaataatcaatgataacaaagtataatggaaataatggagccatctagagcccacaactctcaaaaataaccagtcaaagcccccattcaggaataaatactgaaattacataaactgagcagcacagaaacagtagtgacaagagattggaagtgtgtgggtaaaagtgtaagaagaaaacactgaggagtcagagaggaagtcgacatgtctgtggaaggcatgcagaaagaacaaggaagagtgctggaaagctgctaattacatttcagatcatgttctcatcttagtgtttaggagaatgaattttgtgtaaaaagggatataatgtctgaaattagaggtgaatctcaacaaaaagaaatacatgacatcagatagtaatactttgtcagacagatgtttctatgagtcagatgaaaccagtgatgccctgcccaacagtgttaaagacatcaaggaatgagacatgaaagaacaacaaaaccaagaataagaaagttttgggttgaagccaaaggactcaggaaataactgcaagcctaagaaaacatttctcagaaatgaagaatgagctggaagcaacacagagcaaatgaacacaaaaggtggcacctggagagaagctggaagagagacaagtaccaaaaaaggaacaggactaaaatcaggagatgatgaagaagttggaaagcaagctaagaagaccaccatagctaacccagcatcctcaaggaagacactcaaagcaaaggcacagataccaaaatgtccaatgacataaggggataactctgtggttaagagtgtttactgtgtaaatgtgaggacctgagttcaatccccagcactcatttaaaaagcccgacatgacaatacttgactataatcctggcacttttaagacagaaagagaaggatccttgaggcttcccggtcggctagtctagacaatagtaaactattgattcaatgagagatcctgtctcaaaaataaaatgtatactgataaagacactttacatagacctctatgcatacccaaacatatgtaaacacatgcacacacccctctaccacccacacatatacaattatataattcaaggatactctttgaaaaaaaatcaataaaatgataaaaatggaggatactgtagattataaggggaaggaagatgtctaaaaggggttagcagaggctaagaattagaaaatacctattattttaacatatgaagattttaaaagtacataaagttaacagtgtacatgtatgtgtgcatgatacatacacacatacacatatatacacacatgcacatgctacacacacaaaagcactcactcatacaaggaatccaaaagaggaactctttggaagaggaagggccaagtagggtttaaaaacagtttgtaattgaatatattgttgtatgtcaaataaaactaaattttaaaatgaagaaaggacagcattcctatctgagaacatttatctaaaacaactaatactggggcatatttcagaaacatttttgcaacttatgataaaaattgtttcatatttacaggaaaaatgccttagtcatatataaaagaaaaatgaaattattatcaggcttttgactgtaatgctatgtagacagaagaaagcagagaaatgataaaactcaaagataatatgatctaagcttttatacacaaaaaagtaactttcaagcacacacttgcaaataaattgctttctacatgcaaaaatattcgagattattctcatgggtccttcttgaagaatctactcatgaataagtttgagtcaaccaacatgattagagagaggccaataagagtcagtagaaagaatattagatgatcatatgctctgccaatgtagattcagtacaattattaggaagagtgtaaagagttttattgttttaataatgaggttagtagagctgatagtactagtattgttactgacattggaagagtggtaccttagtcagggattctattgctgcaaaaaaacccaccatgaccaaaaaagcaagttgaggaggaaagggttaattcagtttacacttccaggtcataaaatccatcactggaaaaagtcaggataggaacacaagcagggttggaacctggaaacaggagctgatacagaggctatggatactacttactggctagcttcatatggcttgttcagcctggtttcttatacaaccctagaccaccaactcaggatggctcgacccaccattggctggtttctcctccattgatcactaatcgagaaaatgccttacagctcaagcttatggactcatttcctaaactgaggctcctttctctctgatgactctggcgtttgtcaagttgacacacaaaaccagcgagtaccacagggcataccaaaatggatgaaaatgtaatattctttttgaagcttgttgtactgtgtaagactgccactggggagacatgaataaacaaacatctattcacccaagacagggcagtgatgacagacaaaaataaggagcccacaaagtccagcttggtgaactgtggagagcagatgaagtcctgggtgaatgtgtattcttgccttgaccatgaccatttcaagggccctaatgcctcagcctcatgtgagtggcaaagtcgtcctctggtccaagtatgagtgtccaggattgacctgtatttaataccattgtatgcagaaactatccactatagcttcctcctcctggataagtgtgatttgaaattgctctcctacagagaccacccaagagattcactaaccagccttacctcattaatattgtatataaaacacccactaagttcactggttgctgttagtgtgtctccagctgagcgcatggcccacataatcctagcttttctgtatgtgtatatgtagtttcatttcccatttgccaaatcaagtcaatcccaaagatgtgtaggttatgccagtgaagcagttagtttattggggttacttgaaggaatatgggtgactcaaaggcaactgctttcctgaaaagtcctcactccaatctggctgaagactccctaatggtgcaattttggcattatctgcaagacttgtaagcaactcagatggttaaggcctctcttctaggtaacttggttgttcagtcttctttccaggcagttgtttactgcttctataatcttggggaagtggtcttgtgaatcttgtccattttaataacttcctgagacttgtaagttgtttatctcttgaatgtcatgaactccattcctttctccataaaagaatggagggaatctctctactacacttgagaaccaagactcttgaagaaaaaaagaacaaagaggtaagagacaacattgatctcccatacttgaatcagagttgttattataaattcaagagatattttactctctctctctctctctctctctctctctctctctctctctctctctctctctctctctctccctccctccttccctccctccctctctctctctctcacacacacacacatacacacacacacatatggaaagtttgtagtttgtatgtgagagaagggagggggagggagaggaagagagagagggatgaatacaaatgaacatgaatgtggagactagaggacaaccttaggtattattcttccattgctgtctatctttttggttaggtggttggttggttgaaacaagatctctcaatagcctacaactcaccaaggacacactaaagtggatggaaatgagccccagatctacctgtctgtcttttcaaccctggaattccaaacacacattatcacactcagcttttgtcattcatggttccattgactgagctcaagtcttcgtgcttgcaggacaggcaccttgctggccaaattctctctctagccaaagaaatattttatcataaatttatatgaaagttttacaattagtatagaaacaatttgggttttggattgaggtcagagatatcagagtagatgtatgcatagatgatagatagatgatagatagatagatagatagatagatagatagatagatagatgaatgtacctttataactttctaagctctgccttctgagaagtaatggtaccacagctgagtctagtgagcacacatagcttccaaatcttattttctaaaaatttatttattttttaaaattatgaatatgtacatatatatgaaaataatatatccatattcgtgtgtgtatgtgtgtttgatctcatgcattatgtctctgtagagatcagaaaagggaatcagatcctctaaatccagagtttacaggtggttgcaggctacttgaaatggatgctggagacaggacttggttcctcaataaaaccagtacttgttcttacccactgagcatctctcctggcccaagatcttggtttctaaatagtaatctctcatagaaggaatgaaaccttcttacagaagtatttgttctcagggtagagaaagtaaatgcaaaaggaaaccataacaagagagtagactcaatgatctagtgctttgagataaaaaggagcatagggggatagagaggaagccgaccaaaggagtctgaaggcattatctttaaaaacatgcacacaaagcacaacagaaacaactctactgtggcattctgggatgtgcattttgaagataaaactataaataaaagctagaagtatttttcataaaaggcaggattgtgattacattgaaaggaactaaggactccgattgctgtgctcccagagaagccagtgaattgtatttgttgtcttgagtgtcagtatgctctatgggcattttctaagctctctattttttttaattttatcttctctatttgtcctgtattttacaataaatgtatttgtttgcttctgttgcatgcttttaaatagacacattccagacataaggatataaagagactagacatgaagaaatcataatacatttttatgtatagagtagaatattatgggcacaaactgcccccaaagtgagctgctgtggttatgataatatgagacaaaaagaccataaggcaagataattattaagaaaaaagcctggtattacattaagacaaaaggccaagttcactgggaagagataatactaaacttgtatgtactgtgttacgcgggttagaacatgtaagattaaacctgattatactagaaatgaaaatctgaaatgaactagaaatgaaaagttgaagtgacatatatttaaagctgtcacttaccttagtcattgtcaaagagatcatggtaactattaatgaagatatgaaattttaataagacaaaattaataaggtctaacaaaaataaaatatgacttttggaaattaaaatatatagtcttcttaaacacatattgaatcaactaattttaaaacatgaatacatataacaatatgtatttccttatcatctgtagttaccagacagaagatagaaaaacatgaaagaaaaacccaaatctaacccaagatataaatgtttgtttcatataacctttatttatatattacaaatgaaattataattagatgtagttctctagtatattaaaatctactgtaatcatttaggtacacttttatttttctggcaaggtttcatgtagaaacaagctttgtacataacagccccaaactacaaatatctctgatatcatccactatgcaaatggccaaatgaattatgctactgtatattatttaacagtaatcaaaataaatacatacaataacttggataaatctccataaaattaggctgagtttaaactagttattgataaaatactatatactatataatttcatttctataaaattctttaaatgaaattttggtggacagcaaattagtagcttccaatgttacaaagggtatagggagtgtgggttggagggatgtagatatagatttatcaggcagcctgtgggatcctcgtcatgaagccaacctcctgcatcttgactgtatcaatgctcataactttttatggaatcatacaacagcttttcaagatatttcagtaggcaaatttgataagcatatattggatacttctgtagtatttcctagagatgcatgcaaatctacatttcattccaagtaaactcttaatagaaagtgcaataaaatatgtaaattaaaacatgcaagatatagcaaagtgggattctaaatctttaattctggtttttttttaaggctaaaatatctgtaagctctctctctaagccacacatggagggggagtgtcctttgaattaaaattaaaaataaaaaatgaacataaatttaaaaattaataaaacaggcaaaagttccaaaagttacagcaagttcaaaagtgagaaaaatttctgttattgtctgtctctgtctctctgtctctgtgtctctgtctttctgtctctttctttttatatctctctgtgtctctgcctctgcctctcttcctttttatctctgtgtctctgtgagtctctctgtctctttgcctctctttgtgtctctctgactcctgtctctctctgtctctctgtctctgtctctttgtctttctgtctctcacatatgcactcacgtgcaaacacacacatactgtttagagaacccaaagattctctatagatgtagcaaaatttaaaatatgagagaatagatttgctaattgtattccactatatttgaaactttgggtaaaataagatttctcagaataataaaatactatgactatcgcaaggaaataactcccatgatggttgagtaagtatttcactaccagtgggcatatcttgccaggcagttattaatttacctttcaggttcacaactgcctgagactgatgattgccattctccaacattagtaagcacagcaccatgaaagctagccggtagggaagaagcatccagggtgatttctctatattctgtggcccaaaaatatagcaagaatacagtctttagcaattaggtattcctatcaagccctagaggaaaccaatagcaatggtgagagcttataatatttaacaggtctatggagtctcacttacctacatcttcaatcaaagtaacctattcctggcaccaagctttttatttgttactctctggtatctagtagaggcatttgatagtaattacatttcagtgctttttatatctgcatgtttctctttcaggatgtttatgctttagtaggttttcatatgacattttcagcatagctgtccctccctgtattttattccctaccttgccctctcatccctaatgctgtttaaacttttttgtttcattattcaacccaccccctttgaacgcatcatagtttagtgaatctctcaggacttcatcagagaagctccattttgcattgaatggtgatgagcagagagtcacagctggtcagcagtgcagagaataagggactgctgtgtggtcaatcctatctgaggcacctacatcacattctcctcctcccagggctcacagatcatcacagtaaagggttatcattagagcaagagatagcagtaactatgacatgacagtgttctggatacaataggacagttacacatgtgaactcattatggttgggacagtgtacaaagacttatgcaagatcaagccaaacaaaatcccagtgtggaaggagagataagcatgaagccccacttctagcccccaaaaaggcttttggtagttattgatagttgttgagaagagagtttttcttctctcttctcttctcttcttctcttctcttctcttcatttatttgatattttttatttatatttcaaatgttatcccttttcctggtatcccccaagaagtccctatcccatccctcctccccctgcttctatgaggggtgtccctcccacccacccacccacccactcccacctcctcaccctggtattctcctacactggggcatcgagctttcacaggaccaaaggccttccctcccattgatgcccaacaaggacatcctctgctacatatgcagctggggttatggggccctccatgtgtactgtttgaggggtctggttagttgatattgttgtttctctatggggttgcaaatcccttcagttccttcagtcctttctctaactcctctattggggatcccaatgtttggctgtgagcatctgcctctgtatttgttaggctttggcagagctctcaggacacagctatataaggctcctgtcagtaagtatttcttggaatccatggtagtgtctgggtctggtgactgtatgtgggatggatccccagtctctggatggcctttccttcagtctctgctccacactttgtctctgtatttcctcccatgaatattttgttcccccttctaagaaggaccaaagtatccacactttggtcttccttcttcttgagcttcatgcggtctgtgaattatatcttgggtatccagagttttgggactaatatctacttatcagtaagtgcataccatgtatgttcttttgtgattgggttacctcactcaggatgatattttctagttccatccattggcctaagaattttatgaactcattgtttttaatagctgattagtgctccattgtgtaaatgtacattttctgtatccattcctctgtttaagggcatctgggttgtttccagtttctctctattataaataagaatgctatgaacattctttatgttggttaatggctgatggattaaccatgctctacaggatgccacatatccaagagtacatgagaagcacaacttgtacaggagtttttaataaatgataatgcaaagttggatttggtatggaacagcaggtgtgggttggtgagaggggtatatacaggtgtatgagtgtgtgtatgtgtgtgtgtgtgnnnnnnnnnnnnnnnnnnnngacagagacagagagacagagagacaaatcaaaacataagagaaagagagaaatcaaaataaaatgtatgaaattatcaaataattaatataaacacatgaaatagaagatcacaaagacacacatcagaatcacaaatacacacacacatacacacacacacacacacacagtataaaatgtctctaggatgaatctagaattttcaatggttgtcaaaatgtaattaaaaaagggatggaaggaagtacaatagaagagttatattttcaaacatatattcaatcatcaaaaacaagcagttctcaggccagtaggtcactagtgacatgattgacttgcctttagaagttcaaggcaaatgctggagcaaggggaacaaacagatgcacaatcctcacgctagtgctgatgcaatcgttttcattgggatttttcaccccaaaacattacaccattggagttgatgttgaacaagtaaatcaaaagtagtgtagtataactgtagacttcagaatttttccaaccacagaggaaaatttatggaaattgagcatgtattagtcatgcttaattctccacacactttatgtgtaacacataggtattattttattataaaataattggcatcaatatcaataaaaaggtaatcttacaatgattgtaatgcagaactcatatctcgtacattgttcagagggtggagaacaatttccaatgaaaactgagagatatttagaattttatgttaataaaaatacatactgaaatatatgaaatatagttaagacagaacttagggataaatttaaacaaaaattttttgaaaatgtttatgtagccataacagagttaaaaattaaaggattattgtttcatttcaaagattgtaaagggggagaaacagatgcagaaattaataaaatgaaaaaaaatatacagtagaaatggaaaaatggaagtcttagaatcaaagtttcaataactgatctctctatcatgagtgggtaaaaaaaaaaaaaggtaatacaaggaaactgtgtgtcacctgcatccatgatataaacagtaatactctagcatctgggctcattgtaatgagaaagaatgtgaaatgaccatattagacataatatagaaactgcctgaatccccagattaagtaaaatgtcccccatgggctcatgttctggatgactggacctcagctgatggtgctgttttggaagatggtggaatctttgggatgcctggtatgactggaagtgtgtaactgagtgtgggtccttgagagactattttcccagaatatttcctcttattccttgattccctttgtaatgtgatcagccaccctctgtaatatagttctgccatgatgtcattctgctcacacacagccaagcagttatggcctgaactccctgcaacatccagacaaggcaagaccctctttcctaaaggtttattttgttttttgttttttggggtttgttttgttttgttttgttttgaggtgggagggtaggccacatcaagacaaaagttactaatacaacatggtggcacatacctgtaatccctaccaaggtccgggggatggggggggaggggcggagattgtgaatttgaagttaacctaggctacacagtgaattctcagaaagcctggcctatatagtatgaccatgtctcaaaaccaaacctaaacacacacacacatacaaagaaaagaaaaaagcagaaatagccaaaagataaacatatatacatacacaatacataaaaataaaccaagataatgtctgaaaagacatattatccttaaaaagtatcatatgatcaataattatcaaatattccctctcacattattagcttcaaatagtccaataggtatgctttaccaaacacttgaggtatcaggtattgtagtcttacataaaatcttacagagaagagaaataatgggaactttccatagtccatatacttcaaaataaaatctatgtcaaaagtaggtaaagacaacatttaaaaggaagatgaaatttgtttcccttgtgaatatttataaatcaaatttattagcaaaaacttgtgatagctggtcatctatgctgcaaccttagtggtctatgtggattctcaataggctagcttattattagttcaaataaaatattcaagtgggtatgaaacttgcagggtttgcgtaggaaatattcaaatgtcatgcacaggttgtagtgggttctattgtgagttctgttctgtacaagagaataagattggaattaagaattggctgactttagtgaaccaaaacaatgtggcagagtctgctaaagaggagcaaagcagacatcgacagagcaaggagagtaaacagagcaaatgcagctccagcaaggatctccctcacaagaggtacaaggtcagcaaaaaatagacagaaaaggatacatttctgtgtaattctgtaagtacaaaannnnnnnnnnnnnnnnnnnncgcacactgcattcaataaaaagattattaggaaagtcaattgcatttttatgctccagctgcaaacagaaaaggtattaaaatgataatcattatacaaacaaagtatcatttcatatggcttataaaagcacagatgcatgattcatgggaagacgtttatgaagttatattggaaggcattaaacacatttcaataaatagatttaatattggataaaaagacttgatttgttttagatgtcagttcttcctaaatgaatctgtagatccaatggtacttaaagtaaaaaaaacaaaacaaaacaaaacaaactcttcatggaacttggcaagtggctttcctcattggtgcagaggaggatgtgagagctgagcaatcagaccctgcgttcaatacccagcacgacaaagtcacaaggtgaaaatagcactaggggcaagaacctgttccttcactaataaatatacactataggttacagagagcaagagtacgattttattgcaaggtttgacaagaaaacgacaatgaaaatcaaatctgcacacagatccaccaacctgtccagtgaactgctaaaataataaagctacattgctgtggagtcattgactgtccacaggaaaataattataagggatctggtcacttatcacacagagaattgatttttcaatgaactgactcatatacaaagggaagaggttcgcatttttttaaatatggagaaaatattttgacaatgaagtagaaaaaaatttcttaaacattgagcacacatgtgcacgcgcacgcacacacacacacacacgcatacacacatacagatatacacacacacatattagttgcatgtctagttgctggaataaaatatctgacaaaaacaactttagggagagttacttagggctcacagagtcagtccaccatggtgaagaaggcatggtgacaagagcttgaggcagggaatgtgagtcacgtggcatttatagccaggaagcagagagggatgaatgctggggtttggctcatttttgtctttttaattaggctaggatcctgtggaatgatgcgatctatggttagtatgggtcttcctgcctcagttaacctcatgtttaaacatcttcttacagatgacatggtatttgtctcctaggtaagtctaggtcttgtcaccagattggcaattaataggaaacatatttatatttacatttatatttatagttacatttatatttactctattatttatatttattagaagccaaactatctgtgaaaaggaaagagattaggaggaggaaggagagtatatatagaaagaccatggccaaaacatatgatattcttagatcataatagctttataaaatatatcactacatttaatgaatatagaccaattaaaattatgcaaatggtaatgcagataaattcaatcttactatacccctaaatttttgttcatcaataggaaccccaatttatttgaaaaaatacaagctttatgatggttggaaatatttgctatatacaaattcaataattaataagtgtctagaataaatcatatttctgtgagtcaactttgaaaaggcatttagatagaaaagacatttgataaagtgtggatgattacaaggatctgtgaatgaacataatactgtctggagtagatattaaatacttcatgatgcggtttcacattttacctgtaaaatattagcagtttgacactgcggaacgtgattaaggatgtggagtaatggggtgtacgagatgtgtaaattgtaaaaccactgcacgtaaaactaagcacttaataataaggctaaagacagacatatatcttgcatgctggacattccattctgaagcagctaaccagatcagttctcatttgtatatatcatggattatgtatatgaatatttttagattattgtgcgttcaagcaaaatattggaaacagtccagatggcgcatcaggagtaaagtagataaataacttgtgatagttacactcagtaggatactacacaatagtgaaaatggggcggggggggggggcgaatcaaaatggatgagttccaaacactgcagagagaaaactacattaacatggaaagcattcaccaggattcctataaaacaagggcgaaaacagctctgccttgttcatgtataaaagcactagatgataaatacaaaatgtaaaagtagtctctgcctataggaatggaagaagatatggactaggggaaggcagtgcctgcacttgtaagatcctggcagtggttttcataaactgttaattatggaagctctttccaccattctgaatgttctgtatactctatttgtgctagcaagtggacatttaaaatcatactaatataaaagcataactttctttttttttttttcttctgcggcaaagctttattgcttactcaggagcaagagaggaagagcgcggcagagagaggcagagaggaagagagagagagaggcagagagaggggcagagagggagagaggcagagagcagaggaagagagcagaggaaaagatgaagagaaagagacgaagatacgaagagcataactttctttttttatttgttttttgagacagtgtttctttatgtagtcttggctgtcctggaactcactctgttagaccaggctggcctcgaactctgagatccacctgcctcttcttctgagtactgggattaaagatgtgtgccaccactttcctggcaaaaagcctaactttcaaatgacagagaaaatcaatactacagttgtacaatacctagaaagtgacaatgggtataatgcatagcaactggaggattacttnnnnnnnnnnnnnnnnnnnnctctgccttgttcatgtataaaagcactagatgataaatacaaaatgtaaaagtagtctctgcctataggaatggaagaagatatggactaggggaaggcagtgcctgcacttgtaagatcctggcagtggttttcataaactcttaattatggaagctctttccaccattctgaatattctgtatactctatttgtgctagcaagtggacatttaaaatcatactaatataaaagcataactttctttttttatttgttttttgagacagtgtttctttatgtagtcttggctgtcctggaactcactctgttagaccaggctggccttgaactctgagatccacttgcctcttcttctgagtactgggattaaagatgtgtgccaccactttcctggcaaaaagcctaactttcaaatgacagagaaaatcaatactacagttgtacaatacctagaaagtgacaatgggtataatgcatagcaactggaggattacttaagaatctaactcaagaaattattgttcaacagaataaagcaaaggaagtagatgagaaaaagcacccagaatttagtgaagttacaaaaattcaaactataatatggcctcttcaaggaggtgatgaagtacctgacacaatgattgtatttagagaacatgaagaaaacctatgcagaacatatggaactctccatagtaactacaagtaacctcatggaaagaatggggtgcatccaacagtgatagatgccaagtgagtagggggacacttgctggttttacaaagcaaaaccctagagcaatgtgtacagtcaaccttcagctgtgtttaaaactctcaaggagcatgggaaaaacattacatcagggtcttaataacttcaacaggtagaacaacatagcttaataatccaacttctaagtattttatattgaaaagaggaagtggaagagaaggagtagaaggaaaagaaagaggggaacagaaggaatcatgaagatcacagcaaaacatactcacatgcttataagtgctccatgggtaataaccaaaagatctaggctttggctagctaatggcacaatgaagcatgttagatttacaatgtagaatactttggaacaggagacactgtgactgtggatagagcttataaaatgttgtggttatgttttcatcctgatcatagtagcagccacatgaaatgtgcccatttattatagttcacagaactgcacccaatcaaaaataaagattattttatagaacttaaaaataggcatacttaccttcaagtacagaatatctttagacagttgcacttaagttatatttttgttgttgaccccactgagaaaaacagaacagggaactcagatttgaacaagggctggaatagagtattgtcccacatagcccttataccttcatattttgcttttcatgtttaaacacaacacatatatatatatatatatatatatatatatatatatatattcacacacatatatatacatatattcacacacacacacacacacacatatatatatatgtatatatgtatatatatatatatatacacacacacacacacacacactacacaaaatgaaactttgttctcttaagattagagatcacaggactggagatatagcctggtaggtagagttctttcctatacttcatgaagccccatgttcaaggaccagacccattttgtgaccaatgaatcagaaatatctactggagcctgatgggatcactagcggttacacaacggaatgccataagtcactctatccttgaatctatcagtaacaagtagcttagcagtaagggatgaagctccccagttctactctcattcatgcattactattgacaggccaactctgtagaaacccaacatgggcatctgctgtgagttcatggttgcactgtcttatgtctagaaaatgacatttttgtagctcccccctatttttgactcttagactccttctgtccctcttctgtcatgtttcttgtaccttagtagaaatggtataagtaaatgccttacctaggactgcacagtcatctgtcactacatcttaacacctttgaacagacatgagcctctctgctctcacccataatgtggaagagaggcttccctgattacggctgagagtagtatttgtctatgggtataaacacaaatatttagaagacggtttgatgctatgtcaatttagataacaatacccttcaatatctctctctccaggttatgacctccctgccaaggatttttgactaggtacatagtcccacccatggattctctacttaggggcaggtctcaaagccattcctagaagacttgagttattaatgtcattagtgccacaggggggatacatactatgagctgttggccaaaggggccatagaggcactcaacacaatataggctcttgctattcctcctatttgcctaccatagctagatgatttgaccctatttctgaaaacatcacacatctttattatatgatatagagaaatcaagctggacttgagcaggaagctccctccatgatgattaagctgttatagtcttggaaagaaaaggcatcaacatacctgtgaaccatacaaattacaagaccaactagccaggcaagatgctcccatttctgcaacagtggtagtactgttgcagtggtaaccaaacactctgtgtggccatgttctaacccaagtaaggttccagtaatatattgcaaaagaaacaataaaggttacacaggagtgtaggcaataaataatcatttctaggcagcaaaaggccccaagattctgtcattctacaaagctattgtcattgcagtggtaaaacaaatgatttcttgaagggtgaggagcattagacacaggtgatgggattattgacttgtaattatggtgttatatagaatgatgataccttcataaggagcctttcaggttctttttatgtctttgtttcttgtgcataataaaataaaataagaaatacaccttcttcctccttgatctatgctcagcaaactcctatgtatattcatgttcccaaatgcttgatctgttttcaaagatagccctctattatagatagagttcagaaaatactgtaacatatctagataaccgtattctctctctgcctatgaccagagaacccaggatagtatgccagaattgattgtgactcctcaatggggtcactccaggatggagtagttgaaagccacactgtgtgcagcactgattatgtgagaaactactctacgtgggtgtttaagccatgttttcaacatagaagatcatagtacttttcccctgtcacttcaatttgtagaattgaagtctagcaggttctctcattttacaaagagatgaacttaggttcagaataaaattgcttcaacaatataattagagagaatctgagttattttttttaagcccaaactatttgccagagtgacataccataaacataattaaagggcagttcttcccagacattgagaaatgaatgtgtggaacagcacccccacaaggcagtttgactagaaacaaattaagtaaaaggatatatgtaagggacaggcataaaatgtgcaccagcctggtctgctaagtagaaatgggctcatgagaccaataatcaaagcaacaacacgcctgtatggagcggcttggcacatacagtgttctaggcagctggtttgggttctgactccagctctgccacatagtatctgttggaatgatagacaggttgcttaatctctctttttctctatcccatactttccttagcatcagctggagacattcaaagtacctaacctggttaattgccatggaaggttaaatgagttaatctctacttgtaaaatcactcacaatggttcctggtgcccaggaacggctggtaggtaaaattaccttataagtgtgtttctgttcttcagattcatgaaggatcctgctgggccattttgcaaattagacattcagctcaagaactctgttgccagccttctcacacagcttgagttcaagccctccttggagtgactgtgaggccagccctctttcctctgcctctgataatgttcttacacgaagttttcactagaatcagactctaggacccacctttctatttggcagatgttcctaaagcaaattctgacaaaaaaaaaaaagtggtattttgagaattctaccttagtcttgggttttttttttttacttcctcatacttaaaaagccacaattaaaaggaaatgggaagattataaaacacacacacacacacacatacacacacacacacacacacaaacacacagagggtaattattgattttattaaaaacatctatcatacagccacacagccattgttatttcaagcctgggaatacaatgcacactattaagccatttgatgattcaagataaaagcatgagtaaatatgctaatgaaagtgccagcccgcatcaagatgcccaccactgatcaacctcagacagatctggctgcctaaatgatccctttgtgaacttcctattcaacctggttttctagcgagttagctattttatgcaaaaaaaaaaaaaaaaaaaaaaaaaaaggagagtaatgaaatgaaattctgtgtgatccctgggcctggctgccaaccctggactcctgccctctggctactgttccaactcattttcattgtcttcttagtagaaaaccaggcccctggcattctcttaccaatttctattctcctgtctgcaggggcaggaacccaatgcaatcagtggggatcatgtttgtcaagcctcagttgttggccagatctcatgctggattcttcatgcattaagacatatggtctaattttttctatttcatccttctccctgacctgccttacagagaagctgtaggctccaaaacgataagtattttagtgagataatcacacatttggaatactgttgttcctttccccagatggctcagcccctctgtcatcttgggtcagatgtaccaatgagagtataattgacacacgtctcacagagtgagagccgcaggggctagttcgagtatcaccattttctctgcaatctgtttcatcagcttgagtctcatgtaattaggattggtagagctgtattttaacctgcccgtggacatgtaacacttgctgttggagactacagatgcaagggtatacttttagtggagcataaccttgcctgtactgtacctagccaagcctgagcaactcattcagaccttgggatctgggatataaataccattctctctgttttcaaagatctcactttttctaatgccccaggcttttaaaatggcacttgggttagcctctagtgtcatggacacagtgctcaccctgtgaagttcaaaaagtgatgctgatggaaccttgtgagatgctttgcatggactctgaggatcccagtaggagaaagcataggtccctggagctcaaggtcagaataaaatgtattagttcattctgtaaccttacactggactcagggcagctgtctcctctcttctttcttccctgtgtgtaatggaaattataccatcaatccatggagtccctggcctctaagaaaccttgacatcaaacagtatcttcccttctttctcaagccagggaagatagatttttagggattatgcgagatactatggagcattgttcattacctcagtggaggaaaatgttatgagatatgagtccagttgaagaggagatagctgttaggtttcagactcacaacaaggggctgaggggcatattttacatgccaaagcagatctttcctccagattctcccagcatccctcagtccctacctggcactgcccaagcccaacctcaaacttttcagcccaggggctgggctgctcttagctcagaggctctccttatataatccaaacattttggtctctcctcttttctaccccctcccccatttccttctctctgcaagtaggctttctcttcttcttgccaccccttccctttccttcccaaggtgatttccttggcctcctgcgaactcaccctcataagagcaacttccaaataaacctaaacacacacatacacacacatacatacacacacacacacacacacacacacacacacacacattaatctggcttgagttggttaattttattggcagagaaataacttatcaataatctggagtataaatatgacatgaaagaagaaaatatatgaggaaagatgctaggaattagattcaactggaaggtgtagagtaccatacattcagatcaataaagaagccataatatgacctgagattacatgcaaagtccttagggctgggttcacataccagagcaagtgcactaccatgcttctaaatctgtgccataaaccattagccttttttactttactcgtaaatcacatcaataatacttccctgagcacacatttccccatatatacatttacttactagtaaaagtaaaaatgcattgtgtatgtattttgtttatctaagatgcacagcaaagggaaatattttaaaagatgaatatgtaaataaaaagagaccatataaatattctttcactttctcccatctcccagcatgggttgggatatacataacctactactgctgggccaatggctttgaatcattctgcctagaagtgactttgtggccactgaagatagaatccatgggtaaaggagctttcaaatgcttgctctggcttaatttttcattaagttttaaagaacatgatgaataaagcaagctattcattaatcaaattgcaacggagaggacaaagatacctttggcttcttttttgttttccagtgtcactgatgactgtgaataacctgtgtcctttagagactaagcaggaaggactagatacttctccatgctattcagagaggtattaatttgcacatttaaaacaatggttccggttgctcatgtcagagtcactctccttctctgaccctaaaaatctgtcatctcaacaaatagctgaagagtggaacttaccacgaatctatttaaataataaagtcatgactgtgtcaggcatatttatggaatggaagaacaccttgagatgcaggacactggctttggtgagtggtttgtttgggttaaagttaggaaaaagaaagagataaatcctgttaaatagaaacttgaaagtgatttctttggtgcaaaaaagtgggtgtttctattctatgaaatactatgttttgggcgttcagattcccagagcataggatatgttgagtctcattttgaatgtgtcaatttgtaaacatttttgaatatttaatccatataagcttgaagagtctggtaaagtgttatgaaatacaaaagggtatactttaattcccatctcatttatagatagtattcaaactcagatccaaaaatgtcaatagggaaagaaaatgcattaaaaagcaagatgccattagatcagttgtacaaataattcctaatttgcctgtactctcaagaaatgtacaaaaatataactcttcaaacattattaattagattaattagaaagcatcatacaaccaaatgacacatacttcaaagacacacatctgtaaaagaacaacatggggaattttttaaaccaagagtagcaaattatgtcacaaatacactaacaataaaaagctgacataatattaacagaaaaatgggccgaaattagaatgatacattattgttttattaatataggatttgatttgctttgctttcattcgtaaaaggtctaattattcggagaattgcaacaaatttaaacctaaatgcacacaacaatatggcatgtaacatttcttttcctccattgagtaaatgtttcctctcagtttgcctcagacaaacttttaggagttgagaagatagcagagtatatattagaattcctgcgtttatgatatgcgcataacctatgatggaagacaataaaatcatttaatatgtcaggtattgataagtgctaagaaaaaaaatgaaggttatgttgcagaaagttataggcaagggctccatagtttagtccattgtgaaggtgggcttccctcataaagtggcttacaggaaactatacagtcttgaaggaaaacacttcagatagtggaatccaccagtgtgctgacacagagcaggtagtgttcttgaacaactctatgtataacaaagagatagtatttacagagtgtgtgagagggcctagagagtctcacccatagaccactttaactgacagatcaagtagctggataatgaatgaagcacagatatttattagacatagtaataaccatctaattggtgaatatgaaatgatttacctaatttttggagactatgaattatgctctaaaacacataaatagtttttaaagcaataattaataaagcaagtttgagatctttcaagttagtctctcattacattctctgggcacaatggcattaagttagaaacaagaaaaaaacatataacagaaaatttaaaaatctgaaaatatataagaacttgtacaaaatatataggtcagtgaacacattgtagagaatatgtgtagactccaaaaaattgagtggcagtaaacataatatgaaccaaccagggatttgttaaagtccacacttgcaggaaaaacagtttaaattgtttataataatgaagaacattcaaatactgaatgatgtcatcatccatctggaaaaagtaaggaaagaaccatgaactgaatgaagaggaggaaaggaaaatagccaagagcagacattgatgaaataaatatacagacactacagtgagaccccaagctctttgaagacgctttaaaacatctcaaagtattaacaattatttagaaaaacacacacttcttaaacactcttctcaaagaatgaaatttgctgcacctactttgagaagcaatctgcagtcccctgaagatgtgtgtagcatagcatccagtggtttatagtctagaccagaaaaaaaattgtatttgtattctcaggggatgaggaggtgcacacatgcctttgatggcagaagctagaaccctcgtcagcagtatgcacctatgtcaagcactgacgagtaacttggaggttatatgtatttatttagcatcacattacaggacagtagaaatgagcaagccaatacaaaatggacaactgtcaccaacagtgatattagagtgaaagcttcaagatacataaaaatctatgtattttccctttaatgtgcacttgaaagcatacgcaactatatctgcagtgagatatatagttagagagcacctacctcccaccattcccaagaggtaggagacagaaagagatacaacaggaaggggcaggcagatttcaatgacattttgtttgttccattaccaaaggtgttcattatagataggagtaaagtttataatttttagctacatagactgtattatttttattttctaactgagaatcaaatgtaattgtttcatttttcaagcaaaattcatttttgttttttgctcttcccagttcttcccaatgcccagtccttcccttgtgccctccagtgtgcccctggtcacgcctgtacactcttcttactctggtctccaccttcccacctttatgtcaccttctatatgtaatttacaaaagcttttggcatatggtgtaatttcttaaaatattattgataagtaaatgttagaaacaataatttattgaggttagagagatgactgggcagttaagagcactgactgtttttccagaggacctaagtttgattctcagcatccacatggtggctcacaactctctttaactccatttccagacatctgatgccctcttctgttctccttgggtaccaggcatgcatgagatgcttagacattcatgcagacaaaacactcatacacataaaataaaatgataatttttaaaagcaataacaattgatcaaaaactcaaataagacaataaatcatggctttgaaatatgcaactgataataccaactcaagaagagatatgaaatggatgtaatttttaaaaaaatcaatagttgaaaattcttctgggaaggataatgcaaatctaaaccaatgaaacattcaaaattatttttaatatctgtagttataaaatgcacaaatattccccagtttgtctaataagtctcagatgtcttcctctgacctcctatgacaaaacaaaaacaaaaacaacaaaccaaaacaccaagaggaagttccaggcaaatgccacttcaagttaagaatgaattttagcactacatattcacacacgtcatggcaaaaacagtagaaagatgtgaactggaatgaccactttcaaaatctgatcaggacatagtaaaatttctgtaagagtaaaaaacaagataatgactattttttaaactttgcatgttgcacagtctctcgcccagccatttagtcctcctggtgttctaagttgactgaaaggtagctggaacaaaagcaaaggtgtcactctgttttgataaagctcttcttccaaaaacagttgtcaggcttaattttacctaagaactgtagtttgtctgttcttaacacagagagaatgaatataagtgtatagctatactgcacccagtgatttcacatgtgggtatgttcccaagataagtatatccacagtacctctaacgaactttatgtaattatataaaatgattttcatagcagctgtctcctctctgcatgtgtctgggcacacatctgtgtgcatgtgtgtggtgcatgcttacctgtgtacgcatgtgtgtgtatgcatctgcttgcatgtgtgtgcacatgtgtgtggcatatgcttgagttgtgtgtgtgtgtgtgtgtgtgtatagtttgagttttgtgtgtgtgtgtgtgtgtgtctgtagcttgagttttgtgtgtgtgtctgtgtgtctgcgtgtttgcgtgggggaaaggcagctgcatattcaatatgtgcttgcaaaagccaaaggttgataatggaggccttattcaaccactctctaccttatcttttcactattcttagtaggtgataacttgaaatgactgtaagtgctcggcagtagaatgactaaagaaatagaggaatgcttatacagtatagtattgtattccttgagaacggaggtaggtaaattctcccccacacacaaaaatgtgaggatgaagaaaataggcaaaaagaaatgtgtgtttctgatttcatggatgaaaaactccaaaagtgggtaaactattgcatgcaagtgccagctaggctttaagttacttctgtgactagaggacctggggtccaccatgctgcagcttctgaggtgctgtttgtcatgctggctgcacaagagtgtttgctttatggaaggacaccaagatgtttgcttttgatttataacacgcatgtataatagcaaatgaaacttaagaagggaaaagattaatagatggagacaaagttaggttcaatgaggaaatacaagggctgtctaacactggaaaaatatgttaatgtaattaccacattaatcaatccaaatagaagaatcaagctgaatagatgagcagaatcacttgctaaaattaaaaacccattgatagtaaactaaaaaggatttcataaatcttagaaaagaactttcttaatctgataaggaacatatttaaaaatcaaatgaagcaccatgagaatgatggagtatgaaaacactgtaccaaatgtcaaagaaaaatgaggaggaagcaaccatcctgcctcttgcatgataccgaagatgtcaggcacactcaagaatttttctaaggaaaattgttagatgggaagcaaaacaatacgccaatcacctgtggcatggttgtctatagcgaaaaatgttatgagtgaatactttacaatttgtagtatcttatgggtagtaaaaggctatgttggcttcactaaaaaattgaatcagtgatatgtcattttcagctctatggagcaattgttaattttaatttaaaattatcagaacagctattaccattttcccgtgatttatactatttatgtgtatgggtgtttgtatatatgcaatcatatgtgtgtacaagtacccacagagaccaaaagagggtgttggatagcctgaaactcgagttacatcaggctgtaattcttacacttatattgaaaaagcaaatctatttatttgcattcaaatttgaaagcctaaactggtgtctaaggtttttctaggtatatcaattactcatgttaaacttgtttttagaacttggctgcattgccaagggcatgatgatacccacataacaaaactaaaagctaaactactttgcatgtagttattaaaataacacatggaaatgatgtggatgccttttgataattgccagaaaaattgtcaatcttttgtctcgtaattctcttgctatggaatgcaaattgtaagtacagggaatggaaaataaggagagaaagtttaggtttggcttgtctggaccttgctgccctttcaagtaacctggctgaagacctggagtaggaattgctgatggaactatactgcagttcagaaaacactgctgagaggccagcctgcccagtaactgttatgggcctcacacagacttatcaatccaagtaggatgatcagagcaaagaaaatatagtatgtgtctatttcctggattctcttttctattaggttttctagatctgacctttgcatctccaaataggttcccctagtgaagaagtatagacacacagacaggtagaccactagactgataagcccaggatcctctgaaaggttcagcactctaatatggtgggtctaatccttctttatttagctgtgatcctttaatgcagatccttattttgtggtgactaacaaccacacaattatttcattgctactccataactataaatttgctactgttatgaatattaatgtaaatatctgatatgtacaatatctgatatgtgacccccaaacaggttgagaattgccattctaagagatcaacaagagtggaaccacttacactaagaaaacaaagaaaagttttaggaaggcatggtgctaaattaatgctaattctgttctgttaggcagagaagtaatttttgctttataaattttggaaatcacaaaggattgcgagcagagaaaaagtattatttcatatatcaataattcctccatctatgtaagcatctaaccatctatccatccagttattcattcaactacacacccactatctatccattcacctatttatgcatccctctatccatctctccctccctccatctatccattcttctattgaaccctccatccatgtatccatctattcattcacatttgacttcccattatgtgccaactgtgattttatacactgaaggaaaaaaaatagaaagaagtacacaaagttcttgcttttgtgtatcgcattttttcaggctaatccataactgactaatcacataaacacatgaacaggatactttctgcaaatgacaaaaggcaaacaaataaagtagtctactgtgataggaacatggtcaataaggggaagaaggtttctagttagctcatgaaatatctctctgattgcacatcaccacatcctggagctcacagagcatgatttcacaaatgacaggtggcacatcctttcctgggtgccggctcacctaccatctttctaaccctgtgctcccagagctccaacttcattattccttataattaaggcttccctgtgcatcatcataacatttgcactgagaaaacttgtttccctaattttctcaaggatcaataaaaacaaattaaaatagaggattagaggtgtcttcttgccacattatttttctgagaacaaaagatgcagtgatatcattgttatttctccagaggttcctaaccacgatataaagccatttagcacagtttcagatcttcataactcaatgcttctttccccttgctccagggaaccagagggagaagaaaatgtcggtaggcaaaaggatgggataaatgagaaaagcccctgcctccacattaaaagacattaagagatacatcctttgattgtccatttcttgaaagtaaggggagggctgggcagtatgactggggtatgcagctcctcatcaaatggagaagatgacaagggggtgaaatgagcttgccaaaatccaagtgctgcatttgagaatgtgctgagtatttgggggaatacagaggggtgtggtggtatgttctatgttccagcttccagtaaattgaaagagttaaatccatcaggaaagatgggaaatattcctctcaaaacctctatggaacagccaaaggaccaaggatacatgcagtaaaaaggcaacatttttaacagtgttgtggaaattgtgtattttagcatgggagacctagtccggtgttgtgattagtagcatgggacttagatcatgaccaccaagttcatatcctgtgtaccgctctgggcttttgtttgctcatctgtgatattaaaagctcagtacttaccttatgagatgtgatgaggatgaaaaaagattatggatatataggacttaaagaagaagagaatggatgtattgcagatgatgaaatggtgaatttctttacctaaaccgagcactcctcagatccttcatcactctccccttttcatggatgagtaaactcagtcctgccatcattaaaagcattatgtgtgtgtgtgtgtacatacacatacgtacatatacatatataattataatatataatatataataatatatattatagcacttaaatgtctgctgtgctggttcccagctgtatgacatagtcactgtgcttctgaaactttgacgattttacctgtaaaatagaacattgtggcttgtagttctagtaagttaatatgcggtgaacacagtgcttagctgtgtacctgacatatactacttaaaactttgagcaacatggacaggtgtttgcaaattatggctgatgctttttatggttatgatgtaaggtggaatcaagttaatgactgaactgggagataaatctagtgaaacagaatatcaagtagataaaaaatattcaaagatattgaagatctgaaaagtataattattaaactcaatcatagtaagatgctaagcagttagtgttgagtaattttgatagatggaaatctaaacccaaacaacagatattatctgaacacacacaggactgtcacacaaataaaatgtgcattaacctatgtaaaagaaaattaaatttaaaaaaccttgtcagaaagaccatgttccccaataaataatacaatagtacaataaattggaaattaataaccaaagatactttataagatctcgtgattttgacaactaaatcacacactgctaaattatattcagatgaaagggaaaccatcaagaaatcatggagtgaatagtgatggtgggtcagagaatgtctatacttgtatagagtatatcagagaatgtatatacttgtacagagccaaagccatacatacaagggaatagagttttaaagtaagctgctaggtaacagaggtttagaggcagtatataaatagcaaatggaatgagcaaataaatggaaagcaaaaacaaaaacaaaaccacaagagatgttacacatcaccagccactcagctacagcaacagtaaagcacaaccctgtgcccatccgaatggctcacagaaaagtagtgatgacatcaaatgctaatgaggacatggagaacctggacgcctcatgtactgcttggtggcagatgtcattgtcttaggatttctattgctgtgaagaaacaccatgaatacaggcaactcttataaagaaaaacaattaagtggagctggcttacagttcagaggtctggtccattatcatcatggcagaaaacatggcactgtacaggcagacatggtgctggagaaggagctgagagttctacattttgaaccacaggcaacagggagacaatgagcccctgagcctgggctggagcttttgagacctcaaaggctgccctctagtgatgcacttccttcaacaaagccacatctgctccaacaagacttcctaatcgtgacactccctatggaccaagtattcaaatacaactgtctacagcagtcatttctattcaaaagaccacaggcatgtaaagtctctagaggcctctctggaatctagggtatttttttattttagtttttgaatttttaattacaattgtgtgagtatgtgtgtgtatttgtgtgtgtgtatgtgtgtgtgtgtctgtgtgtgtctctgtgtgtctgtatgtatacccaagtgtatacccattgcaagtgcacgtggaggtcaagggacaacttgtaggagtcacttctcaccttccacagtgtaggttctggcagccaaactgagatgatcacagttggcagcaagtgtccttacccactgagccctctggccagctgtagtctgtttattttatgaggtaaaaaaacaaaaaacaaaaaaaaaacttgtttctcaatccagtgcctgtctgttgcagtaaatctcctcccaaatatgctctggcaatgaaaacacaacacagacaatatgagtatatgctgtgagcctagattgggcagatctaccactacactaccatcttccacagcttatgagacctcttagtacttgcggtttctccaggccatgtgtttctgctctgcttttctttgtcttcctcctcctctgtaccctctccctcttccattttctccttctctctctcactttccactccaccttcccttttatctgcccaatcatcagctctcctttattttacaaattaaggtaggaagcagttagttttacaggaaattacctgagtgctgactcattcctagttcacagccactcacaggagaatggaattaacatcaaatataattagcctcaaggctatccacaacacctgtcctcctggacattcactgtacaaacatgaaacatcttgttcacatagaagctagtatgtgaggacccatagtaacgttatctatagataaccccaaattagaaattatccaaatgcctttcactggctatataactgaactataacacctgtgagacagtggcatcatggagtagtactaagcaataaaaaggatcaaactgttggtatatgtgacagcttggacgagtctctagggaatagtgatttttccaagacaagatattacatgttcgttcacttctgtaattttcttcaaatcatacggatataaaggtgatagattagtggctgtgaggggtttcaatctgggaggaaggaaagcagggggggggaggaatgacttcaatcaggtagtataaataccttagtcagtttctgctacttcccacaattggagatactgcaggtggtcagggctcattctttgctccaaggaagcatcttatcactgaattctccagagctgtggttctcaaccttcccagtgctgagaccctttaatactgtttcttgtgttatggtgactcccaaccataaatttatttttgttgctatttcataactgtgattttgctaccactatgaatcataatgcaaatatttttggagctagaggtatgcccaagaggttacaacccacaggttgagaaacactgctctagagggaataagttctggttctccccatgactggctgggctgagctcaccttgagatgctttgtaagacactacccatccacatggctctacccaatcacctttgaaagggatacctcttcctaatgcacttggagctttgcagccaccccaaacattcgagacatagtaataaaggagtctattggcgatgtgcttctgtctcttgattgtagtgctcatcacaggatactgcacaggttaaaattacataaaactaaacacgagtatgttcaaggatgtagaggtgaggtccgaattaaccctgtggcttgagatagtgataatttcctgtgtgcactttacaacacatattaacagtcgaagaggctggattacaattctcagggaattcttgtgtgtttctttgccacctcttatgaatccgtaatcatttttaaatgctaaaaatgagcaaagcattcatctccagaatatcagaaaaagtccaaatgagcaaggaaaatgctaactgaatagaagagaattttaaaaatatgtatataatttagttctttgaaaagaatgctaaaaaaaataaagccagttgatgaaagaaaaacacggtaaacacaaatatttttaaagtaagaatataatgaatcctgagctgttgaactaagaactttcaatgcatataattatagaaaaacttggaatgacaaacccaacataaggacaaagagaaccattcagtggatcaataggattaaagaaattaaaatgatacccaagcagttcgcaaaaacactagaccctgaatgtaaagtcacaagatcaagccagtcaagtttcagtgtggatggggacacagcccccagttcctacatctatcaaagagctattgtcagaggatggatgctgaggaatggaaagtcattctttttgggggatctggctactgccagctaggttgttcaagtcccagtggatagccacaaatccatgtgctcattgatagcactaatgacaacaagacagagaacaaggtttagggaggtgtaagtgaggacaccttgaaaccagtgaactggaccaaactggatcaaacttccaaggcatgcactgagcaggaatcagacagagaggagagcatactggacgaaaaccaagtggattttacatgacagtcagcagggtggagggctttgagttgatgctggcttctctgttgatgagggaacattaagggagaaagctcctggtaaacagaaaacccacctttggccttctgtttacctagccagagtctctatatttaggactttgtcaccagaactgccttttgagaggccactttggacctaaagagaggcagtttaggttggaagcaccagaagttgaaggcaggtagtgatggatgtatgtgaccaaatacatttcataaaatatgaaaatttaaaacataaataaaagctatcataaaaataacagccacatagaccctgtctcaaaacaaaacaaaacacaattattaaaaagtgagtaaatgaacaatatcaaaaatcccactgagctcatgtgagtggtgagtagtcagttctaatacattatcggaagaggtttgacttttattgtaatgctatttttttctagaaaatgaaacaaaggcaatttagttccttttatgaaattgctggaatcttaattcaaaaattagataaaaatacaagataagaaagtgcaggcacattttatgtgtggatatacagagcatgtatctgaaaccaaatataggcaatgggctcgaccctgtttacaagaatattaatcatacacattggaagcttatctcagttctccgtgtatttcaataatagcataattcatttccttaatataaatgatataaatcatttggctatttatgtaagacaaatgtttaataaaatattgtcaccagtcgattgttttattttaggaaagagaaggaaagtttttaatttccatacttacgaagcagaactttacagcaaacatgatatttggtatagaacatttaggcagttaggggcaatcagaccactatgagttcaaggccggactactctacataaagaataccaagacaaagaagatttcatagtgagatcctgtggtgatttaaatgagattgtccctgtaggctcgcatatttccaggcttagtcccagtaaatgaactgcatagaaggattaggaggtatggccttttaagaggaagtatgtcactgggagtgggcgttgagatttctaaagcccattatcagtcccagtaatttaatttggagctactgctctggcatcaaatctatgtgccactgtgcttcctgtcatgatggtagtggactagccctcggaaactgtaagctagccaccaataagctcctttgtgagttgtcttggtcatggtatctcagcagtaacacactaaaacagaccctgtctcaaaaatgaaccaaataaataaataaatgaatagaaaagtaaacttatcggcatatagagaaaggtaaaggtaacaatacttagagctcagattgacaaaagatttgaaaaattggacagtgccactgatgaccacggatgttgctgcatcctcacacaactgggggtttgagggtattcgacagcactttgtccagttcagtttaatcatcagacaatactttttttctcctaggacaataaacactggaaagagacttatgcagattcacatagggatatagtgtagatggcccctgtaccatggtttatggtagtcataactagagggcagatccttcagtggagagtagaccgacccagcaggaggaggtaagtcttgaaatcctatgcagtggttggaagtggttgactaagggcacacaggggcatagatgtatgccaaagggatagtgcggaacagcaaatcgagaaaggagcttgggtatcttccagtttgtgtgtttaaaatgcatgcatactaatccattgcatgcattgcttcctaaaaattcattcaaatgagagaacatatgtggaaatgccatttctgtagaggaaaagcaacggaggtggagatagagctaaaggtacagaaatagacagaacggtgtttggggattgtacgggctctgttgaagttataagtagttactacacatacgtctatttttatggtcagaaattcaaaatagttccttggggctattccttttgctgactttaggtgagaatcagtttccttgcctttttttcaaggaggctgcctatggttttcttggtgctgctttctgtcttcaatgccagtagcaaggcagttcctctcttctcgactcttttctgatttttaaggaccttttgaagtaatgagaccaactacctgttccggggtaaccttccacttcaaattgctctacctaatcacatatttttttcaccatggaaggtagcaggttccagatgacacaaaaagtactatttacttctgatcacaggagacttggcatcaaggcaaaggatattagtatctgtgagtgtatgtggtctgcacaggcacttgagtggtgggggcattagtgactaacctggccagtttgtctgttggctcaactagttcagtttggcattcagaaggcaagaataacttcccaagctgtgtctctctgtcccagagaagcataacaccctagtccacataggcacgagatgccactgtcttgcatctcctgattgcagcagaaacttctgaactttcagacacctgatgcaaaaccagactgtccttccaatcctggactgtatggtgtgcttcctagccctgtaattgcagcatagacatgtattgatctgggtggtctgagcgatcattcagcaaatgttgactcatactgctttgtcattacatcctgtctggataacagccgactcctgttgggtttgcccacgtgatgtgccttgcctgctacagtcagtattcacaggcatgaagaagctttagaaacctgtgcacaggttgacttaattctggcaaatcaatcaaagaaagaacagggcctggggtatgctattccttcagcccaggatccagcatgaatagagcaaaactgaaaacagttcaaagcctcaaaccaagctgagcccagtatgcacaattcaaggatatgtaagaaacttacaaaatgaattcctgctcgtaaagcaacagcttactacagatcatgacagtgtgtcaataccataccaatatgcatatctgatttcattcaaacatcacaggaaccatgggatataggtacaggtgaatctatgtaggtttgatgggaaggagagaggaggggtaagaatggtcagcatctgagaaaggccttgtgcaaatagaggtccaatagatagcagggagagcagggtcatagaggactttcaacttggccttgattatctaagtctccactctcccataaccaacacaactcttataaagaaagcatttaatgaggggcttgctaacagtttcagaagcttagtccactattactatggcagaaagcatggcagcaggcagacaggcaggcatggcgctgagagctttacttcctgatctacaggcagtcaggcctagagagacactggacctgctgtgagcttttaaaacctcaaagccacttctcctccaacaaggctgtacctacttcagcaaagccgtgcctcttagtccttcccaaaaagttccactaactgcaaaccaaacatttaaatatatgagcctatggggccattctcatttaaaccaccactgtggtcatctttgaaattctgatagaaaaggagttcttgtttggtggcttacataaaggtctatgataaggccacgccactatatcaggctctataaatggagcttcagccaggaaacacagtatgtgcactttatctcatctccactgaaagatagaaaagcaggccaggaagtgatttataaatgaacaagaaggcattaggagggctaatgtgtccagctaatggagctactatggctctgactttccccacgtcctccctggcttctcttttggggtttggtgaagtcactggcacaaattgtttccttcatccagttcattttcactgtctttggctaggtaggtcccaagtgagacaggacagaaaatcgggtctctttaactgacagtagtttttatttgaaaatgttccttcagtttaatgatactcttgtacatttcacagaataaagctttggacatcataaaaaaaaaaaaaaaaagcttggtaggcatttctggggctgctgacacagcagggctcgtcaaggtccagcagtcctgagcagtgtctatagattaatgcaattcctcgtgagatcaagagtgtgtcctcgggtggaggagttctcagttgtgagctgtcagagctttgaaaaaccctagatctgaatataaaagccagactctctaactgaaaggaaaagtagcatttggagagggaccatcaaagtccaattaggagccagggcgctgcttgttgtccatagtctagacttgatttgatctacaacagggcttcttcaatagtgacaccaatagctagactgaagactctttcccaattccactgctggcattattcacagccaggagaattgaaatgttcggaatgtttaacaactcacctggaagcagcatgagttggcttttgaccatcaagagtgtttgtctcatttctctccagccttcctcctccttttctttctttcttttcttttccttttttcttttttttaacaacagacaaggagactgtccatggattatggtgaattgaaagaaaacctggaagatgttaaggcttggcttctcttcgcccaccctcctcaaatctccttttctttctctagaatctgaaaccatgtaatttagaaattgcttctctctttccaacccgattttctctgccataaagtaatttttaaacattctaaagcttttattctcagacttaagccttgtacctgtgtccaatgaatgtttcccagtatctgagcccttgaagagctgaggtgttgagagacatggctggctgaccaccttgtgccagcaatagcacaggtagaaaggagaggggagttggggatctgaaacagagctggtaaatgcagtgaattgtacttccagatttgtagatatggagaactcagtctccaggagatactgacatgggaaatgaagaccatggagcatttagctggttcagagagtataaagttagtcatgatgcttgttcctagctagtaatcttaattatcatggttctcagggtatgtgatgaggccaccaagaacctctaggatctctgaaagactcctgaaaactagaagctgtttctaaatgtagaaaatgcaacatcaaacagaaaccatgtaacctgtgaacctaaggtagtctttattttggtcactagactgtgtagcctgcatgcattgtcctaataccttatctttgcaaagccaggctctgggccatgtctctgatgaaatgcaaatattggataacaaattaacttggagctggcaacagatcgggcagtgtctgctttgaacccatagttgagaagctgtgtgatgctgtacacaaagatgcatgtgttcattagagagtggtgatggtaacaagtaaaagaattcattttccttttgatatgtgtgcgggttagttttatgttaacttgacaggagataaagtcatctgagaagagggaaccacaattaagaaactccttttattagacagggctgtaggcaagcctgtagggtatttttttaaattagtcattaatgagggaggaccaagtcccttacaggtgctgccatccatggggttgtggttctaggtactataccaaagcaggctgagacagccatgaggaacaaaccagtaagcagcacccctccttggtctctgcatcagctttggcccccaatgtcctgcccattttgggttcctgccctgacttccttcaatgatgaactataaagtggaaatttaagccaaataaaccccttcctctccaagttgctttggtcatggtatttcatcacaacaatagaaaccctgactaagaaaacgtgtctgtatcattttctcaaatctctcttaggatgccagggtgcaggtacttactagtttacatggactggctaaagaatgaagccactgagtttttcctcagcttaggaagtacaaaattaaattaccaaaacatcatgggcaccatgcactgggcaagtttgggaagttgtggataattgtatatgaagagtggtctttaaaacagaaacagtaaaaagaggcaattagacaaatgacgccactgtggggagcagtgattgcaaaagccagcaagaaagagaaggggctaaaattgtgaaatcctaacagatggaaacaaagagtatttttctggccagtgctgccataaagcttgctcctttccccatttttaattgaaaaatattttttgtgtgtgaagctggctctttaactattggggaaactgcaaactagacaaaatattgtaacaaaagctcctccagataacgaactggtgggggcatgcactcaggggaattacaaggaagcatcttccgtctcaggccctggcctccctctcatgccacctgttggcaaaagtagccttgaactctatggttaggcagatacgatttttgcagcctcactcctggcagtgtaaagtggggtatcaaaaggttgtttggagtctggcatggtagcacacacttggaatctcagaagtcttgacttcaaggtatcctcaactacatagcaagttcatggccagcctggaatatctgagacactgtctcaataaaacacataaacacataaaaccgaaacaagatagtacttagaaataaaacacgatgctttagtagctgcttcagagcccacaggctacagtcctcagccacctcttgagaatggttgtatctgactctgggttccccatcctggaccttatgggatagaaatggaccagtcatgattaaatcctttcatacatcccaatcaaattcagtcgtagcatggggtcatggattgggaccagagttcctgaccattaaaccaaggtccgagttgaatagaggctgagatagaagttgaacaatagaggtgagaagatcgacaactctttgtcaacacgccatctgtatatagccaccctctgtaactagtacaccttgcttggtgttatatacagcaggcctctaagtaggtttcttaaaagccatcactattttgttataacagaatgcatgatagttcctttagcatgtaatttggtcaggtcctatgtttggttgccaccatggttatctgtgtgtgccttgccaagttttaatctgaaagatggcagagaacctgtcacatgttctaaaggctgtgtccccaacaccctacctgccaccctgttgtggcatacatattttaatctgaatcccagagagaagtaaaacttttaagcaaatgtagagaaaagagtaaagagaacctgaaatcaaagtaaaattatgggcctttgtgcagcacagagcccctgcttggttgtctctatagtgctcattatcaagtgctatgctacccatttgtctgattcagtatttaatcctcttgcctttgatgggccactgtctctgtaagaacagagggggtatttggtctgctcttacatctagtatagcgctggacataaggtcagagcttaaaatatttacttaatgcatcctcatagtggtttttcttggagcaaagacgactgtcacttcactgttataactatcttgactgtcactatcattccttgtcagggatggtaggaggagccaaggcatgcccacttggtagcacaccactgcacaggggccatctgtttggtaggaggtataaatgactactccacttccctgcccttacctcagcatctcaatggtcactgtcccacttgttgtccttccttggacattaaacacagtatttcatgtacttaggctttaattttttttttacctccaacttctctcagtcccacctccaacataccttcccatttacctgttagtgtgcagctatcctgtgcagaagggaccttcccacagaacagtgctcttggaattcggactccaggttaaactgttgctcatttattcccaaatctgtaagcatgtgtccactggaacatgataagtgttttataggtaagagaagcttaatccagaactgagagccaaccagtcaagaccaagaacattacactcagtatgacacaagtgtttattttaggtcaaggagtctaagccttaaagaaaaccctcaacaccacagaggcttctgacatgtattttgataattaactaccattttgccataatcaatatctgaaattcattgcactctggagcctattgactaacataataattattataaattgtgagactgaagttactcgaaatatgtaggctattcaagtgtttattttattagtattagagatagaacctagaactttatgcagtttaagcaagcactttaactgtgtcacgctttcagctcccaaatatcttttaaaacattaatcagacttacatggtgaaaaacaagatctctgccttgcaaacttaagccgaggcccctgctacgacccctgaacagtcttgggactgagtgacttgcagggctacttgtattgacccttatatggaacagttgaatgaaagtccacagccttgactgcctgagctagacaaggtgttatggaagcatgggtctacccattatacatgggttatctggccagctgccattataaacacatgtatgcacagacacagcatagaccaccagaccttcagagtctgaaatatttgctatctggtctcttacatacaaggaaaatgttttcccacttatgatcctatcccatctgcctcaaatgatcctttcatacaaaatggtaagcaaattgcactaaaggacagatttctgggccttcactgagccatatggaacagactgacctattttgcgcttgctagctaatacatgttcatataataaatgttcatctgtgaaagagaattgggatcaagacttgctctcattataacctaataatgcacttatgggggaatcattaacccgaactcacctcacagttccttggtggctttggtttctatgaaaaagaatgtcagggttgtgcggactcgtgttcaaattggctcaggtgagttcccgaagtgaagctattcatttctgctctatgttcccaggcggcgagtacaacccctgtagaagatacagtgggctttgctactctgtccttcatggctatcatggctgtaccctgctagtataaacttcattaagacaacaaactgtctcatttacctttatctctacagcctatctgctccctctcagagatctaagttatgttcatagaagttaaaacctatctaaagtaatatctgaagaggcatccttggaaaattgataatggcaacttattgttggttaaagcacaagcccagaagtcacctaaagtagatataaggttaagagctggatcgtggtaataatatagatattctttcagttttacttactgtgtgcccatctctcctcctcctcctctgggcttgggagttgcaactgtgtcaaacatacagtgaatacgctgaattcttgtttcattcatagcccttcaaaacaggatttctgttgctagtaagagacagcatgaccacagaaactcttgtaaagaagccttatttggggctagcttatagttcagaggcttaggccattactgtcatggtaggaagcatggtgccatgcaaacagacatggttttgaagaagaagctgagagttctatctctggatccacagacagcaggaagaaaataagacactagaccttgcttgagattctgagagctcaaagcccacccctacttcctccaacaaggccacacctcctaatagttgtactctctatgggccaagcattcacacacatgagtttatgggggccatttctatttaaaccaccacaacatctatcatccaagtagaagagtaaggtgccgacatagatagaagggaattgcttccgggtcaggtgtttactgagataatgccatgccatggtgccttcatgatcaatatatactgtttaattgaagagtctgatgaaattgcaaatgaattatctcccacaggacattgccacaagagggtagcaaacactctacctcctcagctaatgtgatccacttctgatggttacagttgttgcagcggctgtcatcataggatgtctgtgtggtcatggttgacaaattcctagccaccaaacatctgccacaataaaagttagtaaaggagtggatggtgctggaaagaagatggattttaattttggtccttctacctttctcccctccctgcttctctacgtatcatttccatgcagaaattgcaaattaatggtcacattgaagtatctgtcaacgtattactgctcttgcagagccaaattatgttggcaataatgtttgcagctgcctagaactccgttgcaatttaatttgaagagaactcaaattgcatctccaaatggatacaaaattaattttacatacaagctatccacctccacattttcagccccatgccccaaattatctcaatttaggttcaactttgaacagtacatgtgcaccagccaactccacatgcaatgatgaatatatggtcaattcatgaattgaaaatcagatttctgctcctttttttaataacatgttctgcttcaactaaggtcattgggagattctacagctattgcctttgacaaaagaaatagaggctgagtccataccaaaaacagaaaacaaaacaaaacaaaacaaaacaacaccaaaaaaaaaaaacccaaaacaggaagcaattctctctcaaccacatgattacccttaaaattggaacacaaagagacctctggtataccctgttgattactgcttatctccttattatattagggcttggttatgatcttgaaaacagacttcttaggctttttagatttaatctgtctatctgtctaacctatctattatctctatgttcaagttatcatgtgaccaaacattgagaaaatcttcctgcaattcaactagaagttgacaaaagtatccaggtgtgttcaacaaagaattcacaacagtcacagtaggctatggaagtccttgggaaaagtttccagaaagtgatggttttagagatggactttgaatatattgcttagggatgtcttatgctgtctctatgggcagcatcccaaacacagataatagcacagacaaaagtaggggatgtcaaaggactgtgcgggtggcaaatttcactctatgagtatggggtttgacgtgtgaatagtagaaatacaggcagagggatttgggataggaaggtctcagtagaggaaagaaaggctaagctgcctttttggagtggcaatagtttctttaaatgtaaaggacacacaattcatatgcaagcgcgcacacacacatgcacatgcatgcacacatacacatgtaagtgtcacggtagggtccctggggccaacttctggtacattgcaggttagccactttagttctccatgagagaatacctacttctaaaacaagccattctgtgtgttatagcttgttactcactcatggtcaagttgtaggaactgcacaggagtggcctggttggatacctcacaacgttctttttgtttttttgtttgttttttgcttgcacatgcactgtactatgtggtacactctgcactgtttatgttgctatgtcacagactggttatgaagcatattggttcacaccaaagactattgtatgttacaaattataattatttaactgtacatggctcttatataaacataatgacttaattacagaaaacaaagacagtacttttctcccatcattcctcagttagttcatattttgattgtatcgtgttgggacttccaaaacctaggatacccaagatataagatacaatttgctaaacacatgaaactcaagaaaaatgaagactgaagtgtggacactatgcccctccttagaagtgggaacaaaacacccatggaaggagttacagagacaaagtttggagctgagacgaaaggatggaccatgtagagactgccatatccagggatccaccccataatcagcttccaaacgctgacaccattgcatacactagcaagattttatcgaaaggacccagatgtagctgtctcttgtgagactatgccggggcctagcaaacacagaagtggatgctcacagtcagctaatggatggatcacagggctcccaatggaggagctagagaaagtacccaaggagctaaagggatctgcaaccctataggtggaacaacattatgaactaaccagtaccccggagctcttgactctagctgcatatgtatcaaaagatggcctagtcggccatcactggaaagagaggcccattggacttgccaactttatatgccccagtacaggggaacaccagggccaaaaagggggagtgggtgggtaggggagtgggggtaggtgggtatgggggacttttggtatagcattggaaatgtaaatgagctaaacacctaataaaatatggaaaaaaaaaaaagaaggctatgcagccaatgatggttgtgtttgccacagtcagtcaggtacacagcagatccagcaatgagacctcacaacgttctatttgttagctttcttacttctcctcctagtttcctttctcttgctatcataaaacactgaccaaaagcaacttagagaggaaagtgttttcttggcttaaagtttcaggtcacaagtcaacattgagagaagtcagatcataaattcaaggtaggaacatggagacagaaaccatggagggtctctgtttgttggcctttaggctctttttgttttctattttttatttttaattattcactttacatcccactcacttccccccctcctggtcactccctcccataaccacccttcatccctcatccgcttctcctctgagagggtgcccctccctgtgtatccctccatcctggcacatcaagtctctgcagggctaggtgcatcctctcccacctaggccagaaatggcagcccagctagaagaacatatcccacagacaggcaacagcttttgggacagtccctgctccagtggtttgggacccacatgaagatccagttgcacatctgctacatgtatgtggggaagtctaggtcaagcctgcatatgatctttggttggtggttcagtctctgagagccccaagagtccaggttagttgactatgttggtcttcctgtagagtttctatccctgtctgggcctgtaatccttcctcctactcttccatcagagttcccaatccactgtttgactgtaggtatctgtatctatctgaatcagctgctaggtggagcctctcagaagacagcatgttcctgtctgcaagcataacagagtatcattagtagtgtcattaattggtgcttgaccatggtataggtctcaagttgggccccttatttgttggccattccctcagtctctgctccatctgctgtctttgcatttcttgtagacaggatacattttgagtcaaaagttttgtggtgggttggtgaaactgttgctccacttgggtttctgcctggctacaggaggtggccccttctggttctagatcccttacactcttatgcacagatctacctgactaagcacaatgctacccactgtggtctataccctcctacatccatcaagacagttccttatagacatagaaactccaacatgatcttggcaatatctcatttgagggtccctcatatgattcagggctgtgccaacttaacagctgaataaaaccagattttctcaatccaactctgtaatacctttgtgttgactttctccaggggttcaccataacagactgaagccctgggaatgcaatcctgttctaaacaagcttcttaggttatattctcattcttcccccccccctctctctcccctctcccctctcccctcctcctctctcctcctcctccttcctcctcctcctcctccttcttcttcctcttcctcctcctccttcttcttcctcttcctcctccttcttcctcctcctccttcctcctcctcctcctcctcnnnnnnnnnnnnnnnnnnnnnnnnnnnnnnnnnnnnnnnnnnnnnnnnnnnnnnnnnnnnnnnnnnnnnnnnnnnnnnnnnnnnnnnnnnnnnnnnnnnnnnnnnnnnnnnnnnnnnnnnnnnnnnnnnnnnnnnnnnnnnnnnnnnnnnnnnnnnnnnnnnnnnnnnnnnnnnnnnnnnnnnnnnnnnnnnnnnnnnnnnnnnnnnnnnnnnnnnnnnnnnnnnnnnnnnnnnnnnnnnnnnnnnnnnnnnnnnnnnnnnnnnnnnnnnnnnnnnnnnnnnnnnnnnnnnnnnnnnnnnnnnnnnnnnnnnnnnnnnnnnnnnnnnnnnnnnnnnnnnnnnnnnnnnnnnnnnnnnnnnnnnnnnnnnnnnnnnnnnnnnnnnnnnnnnnnnacctgcacaaattgtatggagacctcagatctcaaattttaaatctctctgctctgttgctctgggtttttttttttcctttctgtgccattttttgccccagcagtgctcatgagaagggacaaagaaaagtaaggtctcacaggccctgtaatgagtttgtagctatagggacctgaaattctggggtacctgtgacctgaagcatggtcagaagggagataaggggacaggtgggtacagtgcactggctgctgagcctgtgtcctgggaaaaagtcagtctgacaagagccaatatgagtctcaggatagggcccattgctacactgaaaaggtgttaggatgagagatactttgatattccacgagaggataactttcagctgctcagacaaaccagcagctctgtactgtctgctgtcttcttggcctgtaggacgttactgaagaaggtcagatggacagggctttatctagaggcagagaccagaggctacaggcttggatgtatttacacgggggatataaattcaacaaaccaatctctactgcacacacaagactttctcagcaatttttctccttgtttgcaccaggccgaatgtaaacccaggactttgcccacagaaggcaattactgaagcagaatctcagtttggttggtgaggcttattgggggtaggggtggggtcatcccattgaaagcatgactgttcccctgacacattccggaaactaccgtctcataggtaggatgacaggacatctctgtggttggaaacaaaacaaaggggaaatatgtgcctctgagatcctgctgatgcgccggcatgaacggaggagggagggcagaaagaagtgaccagagatcagtttcctagaacaaatcaccatctggtcatcttttaggaagtctgcttgacagatctgagagatgctagacaaacagaaaacagtccctggcaatctgggagacaaatgtataaacaagcaattcctgggcagtgtgacaaaataagtatgatgggcagtggtgcatggagctatggctacactcctttcatggagccttagtgacatataccatagagctattcccaaaggcagatgctaagggcactacctagctcagagatcgagccaaatagtcacaatgactgctttccagaatgtgagctaccacagtcacaaggcactttcagtcatacggatcttacccagactgccactacaatcccaacttattgcatttgaactgagatttcctgagcctcttaatttctatagccccagggaacctccaagaaccatctcccaaggtctgtgtagtatatgaatatgttctgagtcccacttttcctggtctctatgatcctgtgagagttttatttgacaaaagtgtgaatgcatgcatgcatgcatgtctcagctttgtttggagttctgtcatagtatacttagttttgtgatctctgaagaccatgttgaaggtcaaggagtcacgtggggaaatatttgtggacagccccatcattttactatttaacgacttccttgcctttcctactttattcatccccatctcagaccttggtatttatcctcctgtggacatttagtagggatacaagtcctgtgagtgcagctcccattcttaaaacactcctgtatatatggctagcaatggctgaacttagcaagttccaaacaatacccagaaaaaaaaaggcatgaagtttggaaggggttatgtgtttgtgggacttgaggcatgttggagggtaaatgggactagatatgatattttattacatacatgtactgaattctaaagaataaagacacaaaaactgcttaaaggcttcttagggcatttctccaagaaaggcagttctgtataagaggaatccccactgttagggaaaggcaattttctctctttacagttcattttatgctcattaacagccctctgagattagtgcagtaatttccactttatagatgaggagatggaggcacagagatgaagtgcccttggccaaggtcacttagctactgagtgcctgagtctggctgcaagccatgttctaactcaatcatgcatgctttggagaaccaggggctttgcctgtgccccaatattcctacatgtagggaagctctttgctgggggacaggctttcagctactcttgtgcctgagaaaagagggaaggccttgggctaagtcttcttctgagagagacatgaaggtgctttacatgtattcctgcacaatgtagttgcaagaaacagggtgtggatggaagatttgccaacgttccatttagcattaagtctcatcattgtccctttagaggcagatgccaggctcccaagagcaaagcaatccctgtgttgtaatttttgttttcccataagattcttctaagtctcctgcaaattcctggtggctgtggtctgtctaatgtttatgctcctattctgacctcagcttccaatggtgtcatagtagagaaaaacagacatgggacttcctcagattgtgaatctcaagcctgcttctccctgtgtggcctgaggacaaccattttacctcatggaactttggttttctctagagaggggtctttagatgccttctcaggagttttgccatttaccaagcccagcaggcatcccttcaatggctgtgttccagacctctttttacctccttttcaagctagacatggagtcagaactatacaaattccaagccttagttggtcacttgctagacttgttactttatacaagttcctggacctctgtaaccctcgatttatccatttgtcaaatgaggcagtccctccctcccaatgtcacgctacaggatataaaacaagtacttcctggatactgttccattgatgatattatatttgtgcttttaggccatacttgacatctcaaaaattgtattcaacatggaatgttgtagtattcaagatgcttaatagaaatgcatcttcagccttaactgagtattaaatatctgagtactcacttcctaatgagaggaggagaggggcccatgagatgactatctccccggtagagtattggttttgaaaaagtacccaggaggagtgttagaaaggttctacttgggtatatataccaacagagttctctacagatagaaaaatcccttctggacaaaggctacaggggaggctaacatttggtagataggaagttctctccatcactatgcctgtacacctatatttactgcagcctgggtcacccagagacatctagctaagtaacagaagtcatgcctggtcacagtctctaactctgagttacacacatgtttatatttcattgtacataggttcagcatagcaggcaactcatccaatgtcacttttacaaagtcactcttgcttttgagattcgactttcttttgcacaaaggaccctgcaccatgaataatggagctttaagaatgagtgtcagttcctcagttgaaaagaggccagagctactgatgtgcattgtttggggatggatcatcctcctctctgaaatgcttatgaagtgtgtgtgtgtgtgtgtgtgtgtgtggtgtgtgtgtgtgtgttccttggcaaagctctgttataaatctacacttcccacatcgaggtcaattaggaaactcagctggcatcaaaagccctcacccatagccatccttgttggtgcgttccttggtccaggggcaactgtactctaacagctctgggaattcaaagcctggaaaggcgacagtattctagtccgtcatagtgtatggtgattctatctagaactgccatttataagacatttgggttgtgtatagcatctgaaggatgattatacttattactcttcctattgctataaaacaaataaacccttagctattacatataatgtgcttattaagttccaggtgcaactctaatggctcaggataattcatccggctttaccctctcctgcagttgggttagctgctgttatcacttaatttacaaatgaagtaaaaagtagactcaaagccatggcatagcttgatggcatcctgtaagtagcatggggttaaatgtcagtcaggtctctagcatcactatcttgttcgttttaatcggttttgtacaaaagtcatctctttacctcccgcaaggtataaacatcgatgcacagattatgaaggaaggcatggctgttgctacatatgggggactgggacaaagattggaaagtaaaggaggttggggacagtgttgcggtactgaggagtggaagatggtgttcatggaggatgaggaggggacgggacaaagagtgaactactgcaggatgctagcagatgatatgatgtcctatcataagtgaaagtgcggagctgaatccaaaggccgagttcatggggtattgtgatcatacagatggactggaggctggatgtctgtttaggatgtaaccacagttccaggttgtgctgctggacaaaggaggggaaattcaactcaattccatggagaaaggatacagctgagttaagcatagaaggcaggacacaactccagcagcccatcttagaagcgtgtgcagctggtagctcccaagatagtcctcattggaactctcatgaagccctaagaaaccagaaattttatctgtctgtctgtctttctgtctacgtatgtatgtatgtatgtatgtatgtatgtatgtatgtatctatctatctatctatctatctatctatctatctatctatctatctattttcaagacaggcttctttgtgtggctctgactgttctggaactatttctgtaggccaggctggcttcgaactcacagagatacatctacctctgcttcccaagttctgggattaaaggtgcaccaccaccattcagctaagaattttatatttttatgactgacatatttgatcatgaaggaaataggacaaattttcaccctatgtattttgttttgtcttagacctgtgtgcttcaataggaaaaaactgatttaaagaaaaccttcctgttaattatgctgcaggtggtgagagccctgggagagccctgggagagcacagggaggttgagttgtgtgtggaagagcaacagtatccatctgcttcctgcagtctcctcaaaactcttttatcctgtgtgtattttacagatcccgtgcatggcccacagaatgtggagattgtggacattcgggctcggcagctgaccctacagtgggaaccctttggctatgcagtgacccgctgccacagctacaacctcacagtgcagtaccagtacgtgttcaaccagcagcagtatgaagctgaagaggtgatccagacatcttcccactatacccttcggggtctacggcccttcatgaccatcagactgcggctgctactgtccaaccctgagggccggatggagagtgaggagttggtggtacaaactgaagaggatggtgagtgagggagaccagtttatgggaatggagaaggttaagtatgcctgtgggtcatgccagtaagtgaggactttggtttttgcccatctgcttgtgtgtgtgtgtgtgtgtgtgtgtgtatgtgtgtgtgtgtgtgtgtgtgtgtgtacatacatcacttgtttatgcccatgtgtgtgcattcacatggagaccagacatcagtgttctaagtctcttctccatttttttccaactgacttttggggacatggtctctctttaggatttgggactcaagttatccatcttcaaagaccttcttaccatggcattcactgcactagggatgcaggaatgctctgccatacctggtttctatttgatgccagggatctgaacacaggtccccagtcttacagtggaagcactttactgatcaattcaactccttatctcctgtactttgtctttggtctctccactattctcaaggtctccacaaagggaccctgcagactgtgcatactatagctccagagtaaggttatatttccatgaagagtgacagctcagtcataaatatgtgctcatggtgaccccatgtctcccccattctctccttgtgttctatcactcattctacccaagtcttaactcttcagatgcctcttgaaaagggtcttattgtttaaacatgtcgagattgaaaatcagacaacttaattctgcacaaattaaaagaagaaaacacagaatagcttaaggcttagtgtacacactgaatgagctcaaagcagattatccacctggatgtcccacaggcatctcaaataccatgtattgtaaaatgaatgaatgtcctcatctatgctaacttattttcctgtgtgcctcttttcaatgagttacacctgggagctcaagagaaagagtagaaaatcaacctagggatttctcccaaaccaccccatctccccgcaacacttctacttccgccatcccaccccacctccccctgcatcatcccacattcccccataccactttacttccccctatttccaccatctatccccactccaccccacctcccccctactccaccccacctccaatcctacaaggatctacagtgtctgcttcttgcactgcatctttggacttgtctcctatcttgaagatgctgggatgcagagactttagtgatagcacacataactacatcttgacaatactattccttctttagtctgaggtctcccttcatgtgtgcaggacagactcttctgttgctattccaaggcttctcttaaattttgcttcctctgtaagttttctttgcctcaaacttcttggctgcttctttccagggttctagtacaatctgcatgcagctccacacagtagctatcttgtatgggatagaatttgtggtgtctaagacatacctaaaaaacccttgtctctgtgtattttagccttctccttggcctggctgtttatggctctacaatctgactcaatgtagatttgtgtacaagtaattaaggagagtttgagtaggggatggcaaagaggccaacaaagtggcgaaagccatgttacaagttctgggcagttgcatggagagttctctagggtgagttatgtgtcagatgtttcaagccatgggaggaagtgtatcttcacttatgtttcaagccatgggaggaagtgtatcttcacttatgtttcaagccatgggaggaagtgtatcttcacttatgtttcaagccatgggaggaagtgtatcttcacttatgtttcaagccatgggaggaagtgtatcttcacttatgtttcaagccatgggaggaagtgtatcttcacttatgtctggtttcattgcttcagaaacaaagagcccatacctccagcagatagaaaagtgcaattgagaaggttgactctctgggccagtatgcctgggacctcttctttaatctcttgaaattgattttttcacctaatggatttgattaaagaggatgctagattttttaaaaagtggcctaaacccagcaataaattttcaataagcatagctactacattttcaagaaataagaggaaaaaagaagccatgacaggagagcctctggaacaaacaactatgccaccaagatgctgtgggactcgtctccaggctctccattagtgttgcacggattcagaaagtatattgagggtcctaaagaattagcagtgtacctgggtcctgactggagaagcagggtggtagtagggagtggttagtggttaccatcaccaggctaaccctagtgctgacagggaggagcctttgttgaccaatcatcctgatctagccaaggagcaactcagagggaaccttcccaagtgttcgctcagcccctttgagctgcactgtgagaatggcctccatccacagcaagtcccaagtttcagctttaagctatgtcttctcctctctctttctcatttttaccaccaagaggaaaataaataaaccacaaagcctttatcaaaacaatgtgggaacagcagtgctttgaaattaaatttagagtaaacatcattaataaaacatcaattcctgctccaggagatgtgtggacattatcatattaaagacaccagcatgcaagacacccttcctgggtctgtagctcttctgaggccacagctcagaaactgctgcaaggtttcagtgggtgtgtggatagtctttggcagtttgcatttgtttctgagttttggtacattgccttaagatgttgctaaagttggtcttaaactcctggttgaaacaccagcatcagactcttgagtagtttggactaaggcatgcatcaagagttctatagacaatccctgaaggtcaggggcaggttcccttctacctagagggaaaaagcattgactctttctcttagaaactcattcaccttgagaggacattgaggttggagttggggctctggtgcatagctgaaactcccttctgagagccagagagcagcttccaaggttgggataactgacttcactttcacctgccctcaaaacttggatgttgggggagttttcagggtcagtcattttagcaccccaatacttatgagggtctgcagaatcattgtttactagaaagaaaagttctgagacactttgttctgtcaggaaaatggctgttggtttaaaaaaattaaatgaacttttaactttctgtcttttacaaatatctcagatctttacagcatcacttttagccaaactacagctaagcttgtggaaatgtaacataagaagtctaaggaggtgcaaagcacatgacatgaaattgggacagggtggagaggtggagtagtgggtctgggaggagttaggggaggagagggaatgatcatatcaaaatacattatatgcttatataaaattcttgaagaattaataaaaatatctcttcaatgtgcatagctgaagagtaaagatattttaatatatatggacaatattatctagcatctagaaaagttaacatttccttaaaatgactcaacatgtgtcatcaataagatatagtgggtaaaggcattgccacccagcttcacaccccaaggtttgattcctaagatccacaaagtaggagaggagagacccggaaaagtgctcctctgacctctactgtcatgccatggtgtatacatacacatgcacaggtacacacaggcgctcacacccacacatgtgcatgtgtatttatctgatatacttgtgtaaacaaaataagtaaataatgtaattaaaaatagccccaaacactgttcatttcacagcttttctaacaataaactctgctttatatgataaaaaacaaaatggaagacatttttgcactaaagcattaaaagatagtactgtgtatttctcattgcatcttgctaagggtcattggagttctgggagcccctctgtggtgatgtcacatgtagttaattaacattgaaagcactgctatatattatatataaagcataaatatatatagcacatatatacatatgccagatataaacaaataaatctattcccctcttgatacatctcttttgtgatgctttgagatgatgtaagtaccctatgatcaccccaaatctttgctcaatgattttagcatgtcttcataatccttacctaaaatcaattgctatactggtgctttaaggtcttccattttgcctacagtttctgattaacatgtttcttcacagagaggcattttctcatcatcttttctgtgtctagaattctgactaattcacaatcaagttttgaaacagtgtactaagctacatcagtatccttattttctccagtgatcaagttgtctttgccatggctagaaagaatcccttaaagtggaagagactataagtaaataatagaatttaaaaatagacaaacacactgttcatttcttatttcacctatcactaaacttagctctgtatggtaaaaccaggacggaagacatttttttttccattaaaatattcgaaggtagtactgtgtacaacctttacactttcttatcacatcttaacaatgatcatgtaaggtctaggagcccattttgatatatcctcattagtcatccttgcttttttgcatggatgcaatgttccagactgtctgtaatgttcccattcaagacatgaaagtcatcacctgaaaattcctgcttgcttctacaagtagtagtctctgggtactaaggcaggtcttgggtatgttcaatggatcagtggtgactctagctgctccaggaagaaagagctagagaatttaattcacctgttttaaaacatgaacacattgtggttgaatcccaactcctctagatacttctgcccattctacacttgtattcaaacagtgaggaccctggagtctccacatccacttctttattcatctccactcccctgaattgtaccaacctacctacaaacagtgaacctaccaagttaggcagaatattttcatttccctgccctaagctctgtactgctgaggatgtacactctaaatactatgctctaacattcagagtttccacctatgttttcattttaaggtttttcttcccgccatgttttaaaaaataaatgttactactgcttccaacatgcaaattagttgcttcataaaaaagtcaaaattgtatgtttaaaaaggattcatcttcagaaacaactgtcacaatctttatccatttgtattcttcagtacagacctgaaagagtgacattttaaacatagaacagcacatttccttatttacttcctatttagtgctgtttgcacagtacatgtgtatgtttttaggcctgactactctgggggaagagtgattcatattctctctctctctctcccctccccctccctctctatctccagtcattcattgactatagctcctagagagggaccttatgagatttctccatcttgttggcatgttggttggtactgccattgtacaggttgttgagttgtcatggttgcatcttcttgtcatatatagaagacactatttcatctcaggtgtcctggtctgctggctcttacatactctctgtcctctgcaatgtgttttctgagctttaggcagagggacttactgtagacacagcagctgcgactagagagagggattgcctgtagatacatcagctgggactaggtaccccatgaccttgttttctggttttggaccaattatagcttcatcacccacaaaaataaacttcttctaagagggatgagagctaaatttacatttatcttttcaattatttttatttctattttatatagtttatttagtaacaaagtaaataatcttttcctctttctcctcctctccatccttctacttgctcctctcctccttcctccctttcctcctcccttagtcctctccacaacccctctgagcgcaaagccttccacatgccagaactcaaggtctcttttcctttctatatacttcatatttaaaatatggaaaaatgtgtactttgcccgtttttagttttatgttctgtcctagaaaacagtccatatcagaaattgccaattctgctaaatagtgtcctggtcttcatgtctgtgtggatagatgtgcctgtgtccagtggtgctgtttcagttattcactatgtcctactttttctcatctaggtcatcttgtgtccctccacttcaggtatcatatttgctggttgattggctggttgtcataaagaggcacactgtagtcacactgcagcaaacagcctgcttgttaggtgtctatggaaatgtatcttcaggtaaattcttcatggaaggattgctgaagtcaaagggtaaatgcacaatcaattaagttctcctttggagaaggcctgtcatttttcatttccacgggcaatgtgtactgatttaatcttcaaaccaaatattaaagaacaagcagtattttccctattgtataatgtggggatgtaattttaacaatacataaaaatgtaattgattataataagtaacagtataaaatatattaacaaaattgatatttaatatgcttaaccacatataataggtatataatcccaatgtggcaaaacaggtttaaactcaaatgctttcatgtaaggaaaagtaccatggctcagtgccttaattttgtgtacagttctaatgagcctaacttacctggttccttaggtaatagcaagccagaagggggatgtgtgttgctgaagataggaacatctacactaataagaggtagcacctaagtcctccaaggagggaaagtgtaattaggaaataacaacaaggcagatgtaatgcaatgcaaagtcagattataaggatgaaaaactacgtaccctaagaggtcctaacagcctcatttcccctcagcatgttgctccgtaggggttataaaggtgagcttgtagtattgtgagtgataggcagaaatgcagttatgttttccatatgcccacagtgagtcaggctttgtgctcacactcttatattgccaaacaccatgcaggtattgtttgccatggttgctctggtgaggaatccatacatttctaagtgttgcctacatggcttcccctgaccatgtgttatgaaagcctagagctggctgaagcccctctagtgtgcttctcagccttctctgtctcaacatcatacatcatttgttctttagcttattctctctctccctcctcctcctcctcttcctcctcctcttcttccttcttccttttcttctatcttcttttcttcttcttcttcttcttcttcttcttcttcttcttcttcttcttcttcttcttcttcttcttcttcttcttctcctcctcctccttcctcctcctcctcctcctcctctctctctctctctctctctctctctctctctctctctctctctctctctctnnnnnnnnnnnnnnnnnnnnctacagacctacagggttttgggatgtgaccccttgccagagtcgtcatgttgccgggattaaaattcctctacaaggatgttctggggaaggtattgatataggtcatcaaaagcaactccagactctgttaattgttcaaacatgggatataacaggggttgagtttccaaatttataaggagggcaactgctaaagtaccaatgtccttacctttaaaattattgaccaacaagcctgggttacccaatgctgggtaaaattttatttttcttaacatatttctcctttcttcttcctcctcctcctcctcctcctcctcctcctcctttctctctctctctctctctctctctctctctctctctctctctctctctctctctctctctctctctctctctctctctctctctctctctctaatagagacttcattttggtttagtccctaatggatattttctcataagaggaggaatgctggtctataatatgtgctcattggcttagggaggaagctaatgaatgagtacctaacaccaaattccatgcccctctcatgatcccagtattcatgaatcgataccatttcataagctgggggcttatatgggtcctttaggtacaatcaaagctcacttgccctggctcgctaaagctgactgttgttggcaactcttcttgcctccaagttcaataccatattcactgcttgaaatcaaccatggttgggaaattcacaccatgaaaattagaaaacaagttattattttcttcctagacagcttgtagcaaaatatttagtagcatactactatcttcctcaaataaagattatagttgatgtcttgagctatgaggattcatctgaaaggaataatttccctccaataaaaccagaaaattggagtagatccaaatttttttctgcgattgaattaaaaaaaaaaagaaagaaagaaaggaaaggacatgacttcctagatattgtggaggagagagtttactgtagataaaagggaaagcatagctagagacagggacatctgagagagtcctgagtgggcatgaccaaactgagctggtccatgtgtgagagaggagtgagaagaaaggtagtcagacagagagaccaggaagataagggtaaactgaaagagcaggtaaccaaaattgtctggattatatagggaggggcccctgggggaaggacaacccacctcagggctggagaagtttagagtaggtgacagagtataccagccattggtggtaatatacagtattgccacctgtaataggtaggtattgaaggatactggaagaagctggcagccaggtccactttgttaagttaaatagtcacctcagccatttgtatgaaacctaacactctgtaagactcactcaattgcactggtatctgctgaactctttgctaagcggtttgacttttaagtgagttcctggcctctgtataaagaatgacctactggccaagcagccagcgagacacctcagatacaggggtgaaaatgtggccaggacaaagaaagcagacgcctcggcttccttgtccatggctctgagcttgcctgtgtacaacttttacgttttcaatttctgcctccaaaattctgtgatgaacccattttacagacatgtaaatggagaactgaagctaaaagagaggaggagaggctacagaacagacaagatgtgaaggggacagaaagggagggaaagaaacaaggactagagaagctttccttgacaacaatctgttctttttcctattgaaatgaaaatcccccttaaattaccacctgacttgaaagcataagaaaacatctggtttaattacagtgaatttacatgaacccactgacaagaagcacagttaaaattagcaattttagtgtgctttttttttaagagaatgaaattataaagtaattaacctttgttgtagaactctgtcaagaggatggaaagttccatgctgtgacagaagaagaaatgaaattgtggacaaggaaagtgtgggttcattaaagaattatacagaattaaaaaaaaaaaagaatggagggaggcacaggtttagaagaacacaagaaatctctcagcacagcagagtcttttatgagaggagggagagagagatcctgtttcatcaaatgaaagtcaccctcctatactggaaaggacatcctcacctacacaagcagtaatggggtgggagggaagagccttggcccagggctgaaacatcttgaccatggctgtgacacctggtagatataatcacctatcagcctccaaagtaccaatccacaaggttatggtagagaggagcgcatgcacggaggcatgaggatgagctgtatccagctctttcttccctcattaggacaccgtgttcaagtcacctacatcctcaacatgtgtcccctcacatgtaaggtgggccaatagtaccagcaggcttctaagacatgctgtacacagtagcagcaatcagtacagagatgcatatttgctcaaagggactaggaaagtgctcaccccaaaacaggacacctttatcaccatcactacccaacttaaccaaccctccatccctaccaagactcagggaacatcaaggaagagtctgagagaatgtaagagccaaagaatgggaaggaacaatgtgatgtgctatcttctagacatgacatggctatcacattcatggactcaaagtaggtggggttatctgcagcatgaccaagatagctacaattctgtcattaccagaagaggcggtactgtctaggacacatctcttacaaaagcgccttaagcagtttatagctggtatagggaggatgaccattctcctctgaaggtgtggccactgctaggcttcccaaagctctacatccatacagtaacaaaatggatagagaggaggaagaagaagaggcagcagcaagagtagcaggcttgaaactctcaggagcacacattagggagtatgggcaaagttgggtggagggaagcaggagcatggttgtatttcatggtgaacatggacaaagttcttaagaataaagaaaaaatgtttcagagatctactccacagatgtctgaaaataaaacactgagctgtgctaagtggagccagcttcagacagataatataactcttgattggaaaaagccaggccaaggagttatgtgtaatttctcctcactgtggcaagggataactttgagagagcctccagcctttatataatccagattacatctcaactttgaccatgaccttctgttttgcatcttcacgttctgtggatataaaacatcaaccccgctgcaatgactcttgtttcctctctgcctcctctcccatgtgactagccaatcgttggtccaatcctggccttacagctcttctcaacatctgagcccagttcttattttgatagacagcaacagggtcccatgaaactgtgtgcctatacgttaccctccttttagagctgaccacacaccacacttccagttgttccaactgaagccaggaacactcttggtgtgtgtcctgaaaagcatctcctgtttctctggttatttctttctttctgaaaaataattgccccatcttcagaccttatcaccaccttcatactgctctcacacttagatggtaaccttgctgtctataatactaagaaaattgaagacatttaatactccttgacccacacaatgcatgtagtgcccacatagtcagtcttccatcctgtttctggggagaaagtatttgttttctaagtgaagaccagtttctatgctttatgtgccaaatcctacttccctttgcctaatggaagtcattactctggtgatagcctactgtctaccctgcagcaacgtttctctctataagtgatcattacactttacacagaggcttcattccatcattgttagaaagacaagcaagattccccagtcttaccttcttttccagctaccgttccatccactcttttccatatatccattttcccattctgaacttcttgaacacacccaaccaaggctgctcaattccacaccatttctcctatacggttcctctgaaatcacctgttgacttaatttttctgtcactgtgataaaatactgtgacaaaagcaactcaagagacaagcaggtccttttggttcacacatgtaggtcacaatccatcatgtcagacaagtctgagcaaagcagagcattgaggcatctggttacattattacatccaccatcaagaagcccaacagcataaatgtttctgttctgctcattttctcatttgtatatggtccaggatcttgacccattgatctccctacctcaattaacctgattcaagatgatctcccagggcacatccagaggtccatcacctagatggttctagatcttaccaagttaacaattgagattaaccattactcctggaatcttaaataaacgcaaccattgctattcttgaggtgagcatttatttagccagctgttgtgattgggtatgtttggctattataccctctttaagtctcccttttccactcgatttctgggttatcacacttctagatatgtctctccctcaggaattccttttgtctcctggatttcttctaaacatctcagctttattgacttatatttttgagactctttgcagtcatttctgtgccaagggctgaccagacctagcacacgggctttgtagaccatgtagatctctttgacagcttttacatttttgctgctgctgcaggaaagcatccagcaacaatatatacatgattgggtatgacgattttccaataaaattttatttacaaaggcaagcagctagttggatttgtaccaagggccacagattgctgactgtgggtccatttatttacctaattatttctgatcccatggctttgcaatccacacacaagctaataatttttctaattgatgtctccaggccagacctctccccagctctccagagtgatttattcacctgccagctatacctcctcacttagattgctctggtcctttggtgtaaaacattccaaacagaaggaggtagacatcatcgctcaaccaacaccaacatccttctcctcactgtcttctctatcttaattagtagcacctatgttttattagtggctcaagccaaaatctttgactcttcactttggtccatctgagactctggattgcacaacattagggacccccttcatgttgtgttgtctgtaattggtacagtcggctttgtgccaagcaaagttttagcttacccatctgcataatctcttagccccaccttcagtacagtagcactgagacactgaatagcctacccctacccctagccctaccccattgcttgctcccagcctctactgctggctccctgttttcagccatggtgatcaccagtgtggattaggtggccagttatttagtcctctacttcagccctggcctctacattctgttctcaacgatgcagtcagaatgatttttttttttaaaccatggagaaactcacagtagccttctgtataatgtcccaaagtcactaggaggcccagttctgtgtgttcagagttcatttcctacttctgtctcattacatgaatccagtcactggcttcaagtagaccaagcatgcccctgtctccaggcctttgcccttgtcatttccctcggactagaatggccttcggctatctctttgactacatcaggtcttcattcctatttagagtttagagagctctttctagcccatttcatttaaatgtggcagcctcttacatgacactttgtctctcttctctgcttcatgtatccccttagcatttatcaactgaaaccacatttacaccttacctcttattatctatattctcccaaatagaatgcactccacagagacagacattttctctcttattttgtttaccatcacaatgcaagtacttagaacagctccaagtaggtaatatgcacacataaatatgttatcaaatcaatggctcctgagtcctaggagacaaaatgaattttgcaattatttaccaaagaaatcagaagaccattgtaaaagctgtttagcatcctaagtaagctatgagaagatccggcttctgcagttagcgatataataggaatctggaaaaggagattgaggtaaagacaccattagagataggaacagtttttattggatctgtaggattcaaagtatggtatccaagctctgttagagcagctcttgggggaatgccatgggagcgagcctaaggagggacaacaacactgggcacttactttgtgccaagcaccttgttatccatattatgatgatgaaatattaaattcccatgacaaactatgaggaagttgctggtttcagacccttcttaaaacaaggaaaggtccccctaaagatgttaagtaatttgccccaggatagacaacaaacaagtctaaacaaaacacaaatcctggcagtgtgggttctaagccatttcctggtagtgccttataggtccaagtgatggaaatatgaattttgagttaagtggtgctatgatcatctttcttaagatgcatgcccaaagaaatatagaaacagatccctttcgacttgccctgagtaccataagaggctccaacacaactatactggaagctacatgggaagctaactgctgggcacaagggctaaaggcaggaaaaggctacctggagctccgtgccacaaaccactccagatgccaggccacatagtagaggatgggaaatcttactgcaaactgatgtccagggtatatataaggaaagtatctttttttcacttctgttgctatgatgaaatactctgacaataacttaaggaggaatattttcttttgacttgacagctttagcatcatagcagagaaatcaaggaaccagggccttaaagcagtttgttacatggttcctgcagtcaagaggagaacagtgaatccatgtgctctgatctttttcccttcctttacatctaatcaagttgagcattgggactgaccattgcaaaatggaaagcactttaacaggaagttatcatcggtaaggagacgttccaattagaggaagtacagtgttttggatactacaagctgctcctccccaaacatctagaaagctcttctgtagagaatcctccttctacctggttatttctctaaatgctctgagtacatcctcacaagacaagcagaatcttgtctggccaaataatgccttgtttcctccttttccctctgacttaatgaaacttaaaacagggactcattcactagcagaatgacacataaagccaggccacctctaataaccccacttctggtaatacctcttagcacgtttcataaaaacaggtttctggacagatcaaaagtgactccattttaattaaggaggaaaggatctgatattgcaaagcaagtgtctctagaaactagaggggggaaaggcccttatgttgttgtttttataaagcaaatgctaatatccagtcttaagaatagctaagtaaacactgttatgggatatgtccctggaagggaaattaacatttgtaaagacatgagtttccccaccctgatcttttaaaagagttcaaaactgttttctagctgtgtggttaaggaataaaatctataaataaaagcaaggtcaaagaatgaagttcgctagaactaaattaatgagacgtttatttgttttatccacttgtgcagagttaatttcacacagagaaaagagtaaaatggtttttataatgatattaaatataattttatattaatgtttgaaaattatgtgacatgaaaaacttcttggaaatacatttaaaacctaataaaaagaaaaaatctcatgtggttatatagtatattcagaaatagaatcaatggcttaacatttttcaatgaagaaaaagtttaacaatttaagtttgacttgtttttatacatgttatcagatcatcacccagggattttgtattcccctgttactcacaactcttcagagagggaaaacgccataaacctcctgcctcaaaatgatgtgaccataaccttgacttccaagccagcggctttgaaatcttctttcaagtttgcaatgagaaagaaggaagttaggtgcagatatcccaatcaaaatataactaaacaacccagtaacactgtgggaatagaaaaaaatatttcaagaaatcaatactggttaaactttgcaaaatccatttatataattcactgcattaacatactaacagagaggaggaaacatatcattactacaatggattcagttaaagcccagcatgattttaaaacaaaatttctttgaatatgaggaataaaatggaccttttaacctgctaaatgataactacaagtgacctacaaacaccacatgaaaggataaaagaatagcatcattatctttaaaattggaaaaacacatatgtctatcattattcccattaaatgctgtattggtgaccctaaaagacagaaataaaatgagctaaaaaattggaaagaataagactgttattagctacagatgctatgattatttacgtaggtaacccaaagaactctgaatacaaatattagaattaaaatttatatatttcctaagatatccacatagaggaatatatcacatttctattcacctagcaagtatgtagtatcttttaaagatactatttataatttcaataaaaacaaataaaatggacattaaagaagcctccaccaaaacggtacattatacttgtgataggaagatataatattataaaatagaataatataaaggcaaattacctttaagcaattacaatgaaaaacccaaacattaaagaaaaaagtgtatgctgatccaaaaatgtatttatactaagaaaagatggctagttaagacagttgtgaagacgaactttaatattacatggctaaagacaaagtttaagaattacatatgtgtgtgtatcatgtatgtattatcacctaaacatattatatgtgtatacacatatatatatatatatatatgtatatatatatatatatatacatataaacctatacatataacatataatatagtatactatataatatagtatagtatagaatatagattataatatgtatatgtgttttgcctatatgtgtgcagtgcccatggaggccagaagaggatgtattatttctcctgagactagggttacaaatggttgtgatctacaatgtgggcactgaaaattgaacccaggtactctataaaagtcatcttccatctcctggttttctatctattgagacaaatcattatttattaagaaaatatgatgttcatgcagggttggtctaaaagaacagataaacaacacagaactcgggacccatatcctcgaggaaacatggtagacgttagaagtggcacagcaggaaatcaagtgattcatgtagcgaatggcactgcactgcaggtgtgcatttactaaaggtcattttatcagaagcataaattgcaagcttttcattgcaaacatttaaaacatactgttggaccttggaatagagaaagtatctcttcaaaaaacacccatggaaggagttacagaaacaaagtttggagctgagatgaaaggatggaccatctagagactgccatacccggggatccatcccataatcagcctccaaacactgacaccattgcatacactagcaagattgtgctgaaaggacccgatatagctgtctcttatgaggctatgccggggcctagcaaacacagaagtggatgctcacagtcagctattggatggatcacagggcccccaatggaggagctagagaaagtacccaaggagctaaaggggtctgcagtcctataggtggaacaacaatatgaactaaccagtacccctccagagctcgtgtctacatatgtatcagaagatagcctagtcagccattattggaaagagaggtccattggtcttgcaaactttatatgccccagtacaggggaaagccagggccaagaagtgggagtgggagggtaggggagtggggggaagggtatgggggacttttgagatagcatttgaaatgtaaatgatgaaaatacctaataaaaataaataaataaaaatactatttttagggtttttcaggagtccaatctacaataagtattttgatggaagaatatttaggaggtcacgctggacatagagagggggaaacggacaggaatgaatcagggcaagacacactaaccagcagctccatcaaatgctggattttagaacagtgccattcaaagtgtgacgcaaacacaggcattgaatcattcactctttctccatgacagatgagaacaagcacacacgccaagtgttttaagaagagaaatgtttgtttttcattgcttttaagtgttacttttagtttttaattttatttccccagtgatccatacttaaagtgatttattatagcatcagtctgccgtgagttggaaatgtctttatcatcttcactgtcctaaccacccaccactaccacccttccccctgccacatgcaagtcaccaggatttcaatgtttttaagactttgattagagccagtggaatatgaatttatcaaaccaggggtgagaaaacatggatgtccactcatcagcttcctatctttcgtgactggtggatgttttataaacttaacagcacttcttatctcccctgtgtggtgaccacggttattcccatggccttgggtaaagagaatgtgaggtgtttgagtatgtgtatgttcagttggatagggctagggtaccaacagtgtctgctactctctctctctctctctctctctctctctctctctctctctctctctctctctctatatccctccctccctccctctctccctccctctctctctctccctctctctctctctcacatacacacacacacaaaatgtgaaggcctctgataaattcaaatattttaaaaattaataactgatctatatccaaaggcaaatacaaggcacaaactgagaggtttactagtttgtttgtttgtttgtttgtttttttcctgtgctgggaatagaatccaggactctgattgaaacaggctgcctctgaatgcagcccagccctcagattgtataaaaatataacacttgttttatgaaataaagaaaccaggacatcaacacaaagaggcagtatagccaacaaacattatcacatgttcagctcacttagtacataggtaataacagagaatctctgcaaagtgtcatttgcacttaccaggtggcctagactttcaagactgatcataccaagtattcttcaaggatatagaaatgtgggaacttacagaagactgcacaagagagtccaaaatgctggtaccactttggcattactcagaacatgtgtagagtgataagctctttgatctacctattcctaagtacaccttggcaacagtgtgcactatgggaggaaccatctattttccctggatagagttgagaaagaaactgtaagcactatgaggcaccatctcaagaagtaggcatccagaggtggaagccccctccaagccaaccagaactagtgagccacatcccaaatgacagaagataaaagccctcagggtataaataggtaggatcttgaagatgagctaaagtccctatctctccttccagaagattctcaactacagccacaaggcttgagtctaccttagtaaaatctggtatacattcgaagagatttaaaataaacatacattcatgtaagccatgcacaagagagagccatctggaaataatccaatatttaatctaaagtagaatgatgagataaagctaaaaagaaaatgacaatgtcaagaactgaagagaattaatatacagttgatggattgccagatgtcctagaatggcaaacagaagtctaggaacaccttatctgtatgaaagaaagaaagaaaccaaatgacctactgtccaggtggcacatgtatatattgatgactccatataagaatttaggctggttaccataaaattttgtagtcctcattgtgttgatgttggtggaatggggaaagaaggagccaatgaagaaaggcacaaagtgagtaacaccttgctttttgtacagtcaacatgctattatttttataaacacttggtaaacacagccaaactttatatatatttgatatcatgcaaagcaaaagagaagcttttaatgtaatgcaaaacaagagtaatgcaattatgaaaatgcaattagtagaaagcaacagaaattccatagttttaatcaagggacccaaagagaaacgtgagtaggggaagctttaaatagtgttactgtgtagagggacctgaggttacagagacggcctttgccctcaaaagaagaggaaaaggaaaatgcaagaatcagttctgttggaatagctttgaatttttataaaattattgctaagttcttctgactactatttctttgacacaaggtctcatgtaaccgtggttactctcctatgtgttctgtagaaaggttggctttggacctctgatcctctcatctccaccgcccaagcactaggtaggattaggagtatgtgttctccttgaagaataaatgggtaactgtaccccagacatatggaaagggagtaataatgaaagagaagacctagctcttctgcatcttaaaacatgtcatcccatactacagggagatactgtcatagtaggagctatgactcagtgaaggctgaaaacatatgccagggtataaaataagccaccgtggaaagatggcattttaaatcatagtggaaagttttcactggccgagtaattttcccaagaatgttgcaaggaattatgggtaaatttctactctgtgcaatatagaaaatacattccagatggatgacagttttagatcaaacaagaaaaatggcagtaacataaaaacgtcgtaataattactcactggtgttttttatttgcttgatctgtgatgagaaagataatctgccctcagctggaaagcctagtgctaccagcttgagtttcaccaccatgacctccattagacaaacctctctgtccatttccatcccacagaatttcccaccaagcaaccctctctaccaaccagggaggccttcttccactagacaaacctcccccatcttcagacaagctctcagatgaatcagcagaaaccccctttctctccatttcactcctcaatgattaaaccatctccactctccccaatttcttgcactgctggaagacagattatctccaactctctgagaaaaattaagccatcagggtactgaagctccccgtctgagcagctccatctgttcgtctgctttccatctctcacagtgggaaggggacttctccccatccattcctgctcttacctttactggggactcccaagtcagccctctttctctttcttacccttccagtgtgtggccccttttggattatttttagcaacgctagccatggcatacccccactgccatctttggaagtggcctttgtccttgcttcacttctcacctcagctgtcttttacattttcttacccatcataatgaaatttctttgctcataccacgtcatcttcagctccttttcagccctctccagggtagtgttacacaaccagtctccctaaagtgtgcttattctagccaccagtgttggaacactcgattcaacagtaacttcaaggccacttctgagttgaagttcagccatatccctcactactaatcaatcccttccctcccctatctccttctatagctgctgtagtgacaactcaatgtcctggttccctgcagctcccagtgttctagttttcctcctcattcttgagaccagtttcccttagctaagtctaagagcttcttcactcccacccctcattttgtctatattcttgctgctggacctttttccaggacatgatttcaatagtcaaacatgggtctcagtcttgttttttccaaaggctatttacccactctggctggatgttttatatataactcaagtcaaagagaagctgagctcaccagattcctctccagaactagtcatcctttaagacccttctctgtatggataacagtctgattcgtgggctcaatttagcagtgctgggtctccctgatacatcctatcatcgttaccctcatctatcaccatcaactcacactggtttagcctgacagaaatctcccacagttcatttctcttctacactccttgctctgatgcaagctaacatcctttgtctccaaaatgactacagacttcctaactgatttttctccttccacccttgacctcagaaagctatccaccacactccccctgttccctgcatttaccctagatacttgtacgtatccatcaactctaacttacttcccattcaatatcctggcttgctagcctagcgtgtctctgtctattgttctcctagtactgcatacccttacctgagagtgctgataataacttgaatgaaattatctatgagtagagtgacttaacacatgtctgctccctggatcgcacgctttaaaaggatttgaccacagttctcttcgttatttgtgtatctctaatgtcagtagcagtcctctgatcacattaagatttatttgaagagagaagaagctagttagggagaagcagtgggtattttaactcattttcaaagcgtctacatacctcaaagctttaaaaacacaaatgaaaatctggcaaaataaaaacaaaagtatttggaaactatgcaaaaagtgtccctttagtgtcttcacatgtggatgtgagtaacaattcgctaagacaaagatgagcaaaaaaaaaaaaaaaaaaaaagagacacagcaagatgagcccagggtgtagaaagcgtgttctcaaaagaatcagtgcaaatgactaattaaagtgctttccagtattctaaaaatgacacatatacttaattttttaaatagtcagtgtgggcagaaattgggcctaggcatgttcttttgttgggagtccagacttatacatattttctgggaggcaatctggtaatatgtgtcaaaatccctaaaaataagatagttgatctacttaggcctactaaattaattgccacaaatttgtctggaggacatgagcaaagttgcatgcagattctttatacgagtgttcatcgaagaagatgaaattatgtaattatgtaatttgcgaaatcatggatgaaactggaaaatattgtactacatgaggtaacccaggcgcagagtttcaaatatcacgtggaaccgtaccagctcaggaaccccaagactaagttcttgtgcaaaagagattttagaggccaaaaaatgaaatctaccttggtggctagctaaggaaaggctgtccagagactgccctgcctagggatccatcccatccatatacagctaccaaacccagacactattgtggatgtcaacaagtgcttactgaccagagcctgatataactgtcttctgagaggctctgccagtgcctgacaaatacagaggtggatgctcttggctaaccattggattgagcacagggtcccccaatggaggaactagagaaagaacccaaggagctgaaggggtttgcagccccataggaggaacaacaatatgaactaaccagtacccccagagctctccaggactaaaccatcaaccaagaagtacacatggagggacccatgtctccggctgcatatgtagcagaggatggtcttgtcgaacatcagtgggaggagaggcctttggtcctatgaaggctctatgtcccagtgtaggggaatgccaggacagagaatcaggtgtgggtgtgttggtgagcagagggagggggaagggataggggtttttggaggggaaaccaggaaaggggataacatttgaaatgtaaataaagaaaatatctaataataataataataaaaataaagaatgtaatctaatgtttgttttgttttgttttgttttgttttgttttcatggcagaaggaatgggggagaagggcaggatctttcagagccattttgggctggctagaatccctttacatgttgtctgtcatgtatagctctcagattctaatttttaggtgtgcgtttttgtgggattaagttttggtaggagtcttgctacttgaaagaggcccccaagaggggaaatacaggttttaactaaggggcgcagggcaggaaacagaacacacatgatgcggaagtggagtaggggaacaggaagcttaagtgcgccggcagggacaggagatgggagaaggagcttcagcaacaaagtatgtatgagcatttcataaggaaacctgtactttgcacggtaactgaaaaaagcatgtttaacccagtgctatccatagtcataaaaagttccaaccattgctaacactcaatagcgagagttgctctgaccataatgctgtcacctgcccccaagaggtcagtacgtgttctcacaaaatacctaagaattttaggaattttttagttttggttttgttttgtttgttttttgagacagggtttctctgtgtaacagccctgactgtcttggaactccctctgtgaggtgacaaactcacagagatcctcctgcctctgcctatggagcactgggtttaaaggtgtgtaccaccatgcctgcaaaattttaggaatttttcgtatctatgatttgtctagttataaaagaagtaaaaatatgagcatatactgtatgaattaattttgaaaaaatgtaaattcaattttatatttaaaatgtatgtgtgtgcatatacagccatgaaatactggaaaactatgtttgggtttgaatggcagtgattttgttgttcattctcttttaaaaattttggcttttttttctagtgttttgtctccttttccctcttgtattgaaaatagattctgtccccccatacattgtatcctgttttcagttttcctctcactactcctccaggctcctccctaccttccttcccttccaggtccattcactttctgtctctcattaacataagctcctaaaagataacaaaataataacatatttaataataataaaatatttaatatttaatagcaaagcataacaaaataaaataagattaaaaatatcaaatttggataaagcaaaccaatggaaggaagagagcccaagaaaaaggcacagaatagagacccacaagttcacacactcaggagtcccattaaaaaatattaaactgaaaactctaacatgtattcctatgacctggtaccaacccgaagatcttcttgtatatacttaataccaacaaattatatgcatcgtgtccataatgagaaaagctaaatgcattttaatttgacaatggggaactgattacagcatgtgcttgaggctctatttagagaggcatagcacgatgactaagagtgtatactttgaagttgggagacaggtgttccactccctcttcacaacttaagagtgctgtgaccttgacagagttagctaattctcacagcttcatttcctttatcagcatgaaggggataatacatacttgaccgatctgttttgtagcttaagtgaaataatatatgtaacattccaatcaaagagtaagcacttagtaagagtacctgcttttataatgctgagtaagcacataggaatgctgagtaagcacatagagtacttgcttgtataatgctgaagtataaaaagatctggtaatgatttacatgaattcttcattctctaagggcttataaatggaagtttggggaatcatttactctctagctcagcatcttctagactgttgtgtgaggatgctggattcagccagaagatactgatgggaagactagcctattactgaagcagtccttgggaaattgtgctcattagggccaaatactgggataagtcatgcatcagcctctttatccaaccagcaagtggatattaagcatctacccaacaagggattaagagactcagcagaattatgagttagctgacttcttagagcaatatgaggtctcctaattgggtacatggttaaagatggatccagaaattaagaaaccaagaaagcattttctaaagttggagaaaatttggcaggaccaaggcaatgtattattaaaatgatggcaaatctattttgcatgcatcaaatcacattcctaaagctggctggagcctacttacatccctgtgcctgatttggttcacatcatcagtgggcttactcaataggtgaatgaaaagctgtcacttcatgagtcaaatccatctcactgtctgtctacggaaataaagatttgtctaaatatatccatatttattcatttacagatcctcaatggccaattttttttttgttctacaataatagagtcaagaacatggatcagaaatagtgtcagccatcagtcctaaaatgacgtagaaggtaacattaggctcacagcatttcctttctgtagttccaggagctgttcctctcgagtccatccaagggggtccctttgaggagaagatctacatccagtggaaacctcccaatgagaccaatggggtcatcacactctatgaggtaaggaggctcctgggctacttcagttggctcagcttcattcagtgagtgaacacctgctccttcaagggcataaaggtgagtaagacacaagcagggcacagagttgggccattttgatcatgccaaagagaaatacatgtggacataccaggcattgacatgatcatggttagaagtgatctctttggcaaatgaatcaatagttcaaagcatcagattgccctaatgtacaagggaagaccaacacctggaatgtggaagctaaagttcatatgggacatgacaatgcacaatgttcatgatgaatcattacatatattatataaattatatatctattttagcatatatattatcatgtttaggtgtttacttggtgaatgtgttcctcctgaagatgctctatcccatgtctaatatgataaagctttgctgatgggtggggaggattatgaactgccatgtgtgtgtttatatgtgtatgtgcatgtatgtgcacatgcatgcatgtgtgtatcataccttgggttttgagaaaatcctatagctattctgtttcaagaggaaaagattcctgagttttaacttgctctgtgcccaaagcctattgtgtcattagctccctagtagttcataatacttcctacccattagcaaagctttatcatattagacatggatcaggccattttcaggaggaacacacttaccaaacaaacccctgaagatggtgaactaagctatattgaaggccattgcaggacaaaggcaaaactgtctccatacaggctgatacctaagtctaggatcaacatgggggtaagactgactttccttttattgctgtattctgagacactatgagtttctaatactggacagagtagaaaaacagggtgaaacagatgagaggcatggatggtgaagtttaaaaagctatggccttgtgtctgataagcttgtctgtattctcagattccccttggttgccccctcctctctttagacctgatgtcttacctaaacaatgaaggtaccaatcactacttcagaccacagcacatctaaagagacaaaaagcccggggattcacaggctgaaacatgaaccctgacttataaagtttatatggcaaaccacaatgctcttggtgaatcacgccatatatataagaccttgggttagtctcctgtgtttcaagggtaaaagactcctgagttgtaactttctttgtgccaaaaatataatattagcgaactggtagttaatacccccacccctctgcaaggcttatatcactaactgttcatgaagaaacagtcacctatagagggtgggttcagggaggaagctgggggcattataaagtcttttacagtgaaggatcaggattggtctaatgaactcatatgatttttagagatatgggtggtcctcaagtgtctctgaaacatattagcactaggtacaataaaaaacaccttgtctcaccggacacctagcctccaaggatctagctaacagcttcattttacaaagtgcagggatcatgatgctatccccaggcttagcacttggaaggaggaatacaagcacccgaatgcctatgaacctttctgggccacagagaacaatctttctttcttcccgtgttcatcattggagaagcattcctcttggcacacttggctaaggatatggtcaaaacattatctgggaagaaagagagacatgaatcacattgattcacagtaactcatagttgtgtgcttttcactgtagagactacaacccgagagaaagaaagaaagtaaaagaaaaagagaaagagacagaggaggagggagagggaggcagaggaatagacagacaagcaaacaaacacaggcagacagagattgacagaaggagacacagagagaaatttattatgcatagcagcctgttctttatgcagaaaggggaaagatccacgatttagggagtggtagtattatcatatgtgatttctccattctagaagtatatggatttagaattcaaggaccaggaacattgaaaagattttaggactcaacataagctattttaccatcactattaacatttaattttgaaaaatgtaattccaaaaatacaaaaggatatcattgtataataaaaggctctgaaattgaatgaatttagctttatgaatagctcatgacaattgccttatttttttcatttgaaacgatgatggcttggtcatgaaaaggctctgtacttgcacttaccttattttggaaaccacgaagttccactgttttggctctgtgcctgtatctcagcatagacttctttctcaagagcaacatcagtttctatatcacagggctattgtgctggactagcaaagcaacactttggtgttttgggattagaataaagaagtagatgattagagaaggtagcagcaacagttatgaattagacacattgagtaataactcccgaacttgtggcatctgtgtgaggtacactctggagcactagacacaaagaagaaagcaagatggaacagcttatctgccttacttagttgtgaaccagccaccttgtggagtctcaaagacctaattctatttccatgatggattcttggaaatggctctgtggagacatttccaagtaacttcttggcttctcctcaggctatgatgatagagaaccagggccataagattaaagttgactgatactaccatgagccttttgggaacacaccaaaaccttttgggggattctgtgaaggaatctaggagtttatatgtttagtccattgtattctgtaggtaagcatgactgtgatggcaaatgtcccaagctaatgtggcccaagcattgtaagaatgttgaattacagatcagaagctaagtttagttcattatgtggtaagtgagctatggtacataagtgggatgtagtacatctcttaggattgcaggcttctcaactggaaaaaacatagtaaataataataataataataataataataataataatagatagtaatgtattgttaaccttacataaaaatgaagaagttgaggaatggcaatgtgacatgttgttgggtcatacagccagggtgacatgcatatccctgtctcctgagttcaggtgcagcctctgatataacacagagtagttcatgggcttgtatcacctggggacttcagagatgtaacatgttaggccccatcaataaacagaaaagttagattctccagtttaactagacccttggtaggatcatatgagcattaaaagatgagaagctcttttctagaaaacactgctttttagaaaatattttgcaactgagcaaatagtatgccctcttgagcaaagagaggtggtattccttctaccatcaactcaagccaaccttgcccctgagagcaaatagggggtccttgcttttagagacatacattacaaaatgtgtttatggtacaaattccaaatttaattagataaaactaacttgctttttaaaattaggatcccactataattttcagagataaacccataaattacaaaatgttgtcttctagcctcaaaaagaatacctttgttacagagaaaaatgggatgacacaaatggaagaaaaaatagactgtttatgcctttctatatacaactcaacctgactctgcaaagccgaagtatgtatatgctagagttcacacacacacatatacaaatgcacacacacacacacacacacacacagagagagagagagagagagagagagagagagagagagagagagagagagagaacttctcttccattgttaaaaccatgtatcttaaacagagttggtccaagcagtgttaaaataaaatttcttcccctttaaatccacttcacacaacaaactctggatttatccttaaacagtcctgcacacccaattctaaatctaagtggtttttgattaagtaccattctgtctctgaactttggtcttcactttatgatctgaaagtgtcaaactgtcctgggcttcaactgtgtaagaactgaggcatacataaacccatgtcaacaggccaagcaaaggttataaacctctgtgcgtttactgtgcctttaacctgaacagagtctgggaaagacaagcaaggaggacacaaagaaactcagtggtgcagcagccctgcagtaggaatgacagacatgtctgacaaacaggcctatagctagctggtctgggcaactttgtggattcttctttttccatccttttatccccacccccacccaggtattcaacccctaacactagataggagagagacaaggatggaagggagaggggaattaggaagatcctcgaatctaattatttcccttttgtttcctctttgatcaaggctaccaaactgcagccaatctccctaaacagccacacacctccaaccacacctcccagggctctaacatttatataccctctgaaaagttctcagaattcaagatgtcacataatcgaagaagctgtctacagctggcaaaactacacctctgctagagcacagggcaaagcataatcagctgctgtggacagtgaagtagctccatatccccatacctgggtttaaaatgaaaacatacacttagaatatttccatggtttttaaagaaacacagattccagaattctcaaaactgtcatcacagaggcacacacgcgcgcgcacatacacacacacacacacacacacacacacacacacacacacgcacgtggagaacagaagatatcagatattctactctgtcactctctatatgattcctttgaggcatgcatctctcattggacttggagcttatcttttctttttttgttttcattttgttttgtttttggctaggctgactgaccacgtgtgatagccacgacactatctattcttctcagtgctggggtttcaggcagatgcagccatgtcttcctctctacacagatgccacagatctgactccattccccatgcttgttcagcaaatgctcttccccaccaagccatctacccagctgggagaatcatagtcttaaaagagcacctcactgttctggtgaatagtacactctgggttacacaggtgtcttgtgagtataggaaatgcaccaggaggcaagaccattttcatcttctatgacagtgtgacgagggctcactgttctattgtacctggatagaaaacttgaagaattgttatagcttcctctttcttatttctgacagaccttgacagtttccactcaatcacatgtttttatttgtttttttgttgttgttttgttttgttttgttttgtttttttttgttttgttttgttttgttttttaccttgatgagcttttggagcctgggcgggttagcttctggactttcctcccgtaaaggatgcgagtctcaccgtgactctgttcaccttctgtggaccagcagtagtcagcacaacttcccagagaaggaagaactcagacttcgcagcagcacctgtaggaagtttggatgaagggcctccggtcactgggtattcttacttctgcgcaagatgacgaatgcatgtctgtgatttattccctgactgagtgacaggtaatggtccagatggcagtgtcatcagcacaacatggagccacacactagatggaggtgccaaatctcaggctccagaaccatggaatcagatcttctcttaccaagatcccccaatgacccatgtgtacgttacagcatagaaagttctgttctaagagatactctaaagtctccccatttggaacttaagaaggaggtggtagagtttgttagggaattatcagctcatctggtactatctggctaataaaagcatggcagccatcacatggaggatttgaccatgtgctaaggaatgcctcttttcaacaggctccaaagagctgagtgtcttcattaacagtataaaaatcttgctatttacaattttgttttgttttgtttttatggctgggtgggattccaacgttcatcagttaggacttggatacaagagaaggacagtacagcaccctgattcacgttttagggacaactatgactcttcaaactcagaccatggcaatattggactgaagcttccagccagaaataggtacccaagggcaaaaacctgtcaagcaattgtctcaaagttcttcaataaaatcattgggagacaagctgctcagagttcatgaaaaatagtaatcaatccgtgtttcagttcaattaattgtgctcatctctgccccaaaataaaattcacacagcgtgagggaattgggccagaagatgttacacttgcaactgggttaacgaagtgtgaaaatatttaaaattcagacatatgaagctttccagtaagcctttctgtttagcagtcaaaatcaccaagtttctaattacagtgtgtaaatctgagaagcttaaagggaatgagaagaccctaatgaggcaggaatgggtgtcttgattatactagagttgattgacatttatcttgcaagctattctaggtacccagcattcagagttaaataaaacacagactttgcctcaataaaacaagacagcattcttgtgtgggagcgtcttgcaaaggtacggtaggtcggagaattgtcaatatttttccagcatacagatggctggattcaatctgaacagtaatcaggggccctagaaagcaacatcctaagtaaatgcactgccggaggcccctgtgagttcagaggcagaggagctttgaacaggatgggaacagataccaagactgatggagagaggtggcctgctatgtataagttcagggttaagtgcttaaagaggaagctactagatctggatagatgcatataccacctcctaccctttagctttatcacagtgagtacttgggcctcatcaacactggactttcttatctgtggtccacagaggcacagcaggaatgatgtgataccttccagatggacaagaggcaggaagggatcagctgaatcatgactaatataactgtaagcctgaatttgaataatttaagccagatctatgttaattaggatactaaattttcatactgcaggccactacggggtatgttaagcctggctagtaactaaaaaaagaaacctcttaactctgttgagttgttcatgccagaaatgagagcgttatctattatcctagatgctgttcaaaggatctaccagaaagttccatcattcctcctgcctaaatagtcccaggccggaccaaatggccccctttccacctaggctgttctgagtgccaccagatgcctggattgtctgcattccatccacatcccactctcagtacattgacagtgttatcatgttcatcctgttccttggcctcgtctgcattttaaggcacttcatcctagactggtccctccagtttcttcttttagccacttgctttctttaatgccttttaagagaccatattcaatttgtctacatagtgttgtgtagccttatccaagctgttggaccgttaacaccatgatgatgttggccctgtggtgttggattttctgtgttatcttgacttaatcacaacatccagatgtgtgttcacacatgctctcgtgggggtgctcggaatcttggaatgagattagctagagacttgtactgttaataaagaaaattgatatataatatgaatggggcctcaaccaatcaggtaaaggtttgggtagagagaaaggtgatctttcttgagcaatagaggttcagcccgcagactttcagacttgaacttcaacaccagctctctggttccctgtcaacctttagaattgacatgactaatgcaggccatttttgtttgccatattactgttgttgtgttttataaaaagaaagaaagaagtcagggatatgtttggtagaggcgtgatatggtgagatggaagggggtgcctctgggggcccatgctgagacattccttccctctgaggtaacaatcagacaacaggtatagtatagactagagttcatttggggcatgggaatgggagttgagaagggagtagagacagagtcagagacagagacacaggggtggggggagcagaaagtgtgtatagacgagtagaggccagccatgaacacatggagagaaaggtgtgggaatggggagagagggacagagagggaagagagtaagagagtgagaagggggacaaacagtcccttttatactgagtcaggcatacttggctgttgccaggtaactgtgggatggagcctagaagaaattctaacaaattgtgtcttggagacccaaagtaatactttgtgtataatatgtactcaataaacattccttaaatgaatgtatagatcttaacatgaggtaggaagaaattttgactgagttctcgagtggtttttaagtctagttaaagataagtattacccattgagaaattcactcctcaactttgctttgactaaaactgttctaagaaaggcaccttttgttgttgttattctttttttaatttatttttaattagatattttctttatttacatttcaaatgttatctcttttcctagtttcccctctgaaaaccccctatcccctacccctccccctgctcaccaacccacccactcctgcttccttgcactggcattcccctatactagggcatataaccttcacaggaccaagggcctctctacccattgatgaccaactatgccatcctctgctacatatgcagctagagccatgagtcccaccatgtgttttctttggttggtattttaatcccagggggctctgggggtactggtttgttcatattgttgttcctcctatggggctgcaaaccccttcagctccttgggttctttctctagctcctttattggggaccctgtgctccatccaatggatgactgtgagcatccattttctgtatttgtcaggctctggcagagcctctcaggagacagctacatcaggcttctgtcagcaagctcttcttggcatccacaatagtgtctggttttggtggttgtttatgggatggatccccaggtgaggcggtctctggatggtcattccttcagttcctgtttcacactttgtctctgtaactcctttcatgggtattttgttcctccttctaagaaggatcaaagtatccacactttggtctttcttcttcttgagtttcatttgttttgcaaattgtatcttaggcttgaaaatgtaggtaaagaaatgatgagatatctagtcaaatgagtgtgtttcaggatgggcttcattgcagtctaaatacctaaggatttcttatggagggttctagcttatagaatctgagagtatttgcttgcttgttataaagaagcacaatgcaaagaaggaaacctagcttctgctggcatatgagggacctgctaaataaacagcatggaccctggctcactccatattccatcttattggactatgctccatcatcccctttggatgcagacacttgagccagcttattacttactcacagctagatgcaaggtgcctatgtagtttaaggcttacatttgagaaggcctggttggtctctttccctcaagattaccacatgaatagggtatggagtaatggcagacacacagggaggcatcctgtgtgtctgatgtttgcttcagcatccctttataattcaaatgccttagctcaccacaaacttcatttatgattctctcccacttcctagatagcagaggtggtactattgttttttgggtttgttgttgttattagattaagaaagcaacatatatacacaacacttaatatttgcctagaggtcttctctaaatcttaaaagccagggctctgagatgcctggaagccattttttttttgtcctgagccctcagctcaccattcacttctcataggattccagagatgatgttaaaaatgtaggcatctctgggtagatgccatagacagagcatctgaggatgagagggagggtgacgggtgtgttactaggaacagctctggttggaaaggcagatgtctgacactcagagtctagaagggagggagggnnnnnnnnnnnnnnnnnnnnnnnnnnnnnnnnnnnnnnnnnnnnnnnnnnnnnnnnnnnnnnnnnnnnnnnnnnnnnnnnnnnnnnnnnnnnnnnnnnnnnnnnnnnnnnnnnnnnnagggggaagaggaagaaggggaaggggaagaaggagaagagggggaagaaggggaggaaggggaagaaagaggggaagaagaaggggaagaagaaggggaagaagaaggggaagaaggggaagaggggagagaagaaaggaaggaagggaagttagtaggttcaatatagttgcctgttcatcctccctcagcatatggaaggtgtctatatatttgccttgggtgctctttttcttctattacaacatagatatttgtgatggagtcagggaacatgatagaagacatcaaatgcacagtgtgtgttagctaaaggacagaaaatcattctcttggcaataggtggttcagaaaagataccagtcattgagttcagctgtaaaccgtaggtatagtacacaggaatgcagtatagacaattcaaatgcatttgtgtctgagtggtggtagtggtgtgcgtgtgcatgtgtgtgtgtgtgtgtgtgtgtgtgtgtgtgtgtaagaatttgtattttgtgagtttattctgtggttgctagtatgactatgaacgtgtcacatctgttgcagtgtctacatgaagtgtttagtcttagagaatcctcagcttctcagctccctccaggtccctgtggaggggacactgacctcttgggagaactgctccatcatctcaagaggctcccaggcgtaactcctggacttcttgacataatatcatttagaaatttactgagggagaatttcagattaaagaaaaaaagaagaaaaaaaaaagatccggggagagataaaggatgaacataaagttagactctatatttgcccagcatgggctcttttatgctttttctatggaattgtgttttgatgcactgcgtgggaccagagcctttgtaggggaccctcctgtacacagtcacatggctagtgagggaacccttcctctggtgaccatgtcctttcaacacactgcccagaggcggtattaagttgcccgagaatctctttaaacatcacaggttgtttccttttcatgtctgatgttttacctcctcactccagtggaattctgccaggctgggcagtgcagcatgaatgtgtcgcttttaaccagctgcctggtttgtttgttttggtccgagcccttcagtgttcagcacagaaatgaagacaagctgcaagttttcatctactatcaggacaggtggaagctcagagcccctggagactggaattcaaatctgcgattgattctagcttatctctgtctttgtttaggaaatagcagatggcttttcttctcctaccccaacccagtgggctcttttctcttcattactttttgctatactcttaacaaggaagaagtaattccattataattggcaccaatgcaaagaactttgatctacttctagtttcaactcagacagcccattggttctcaaccagtggaccagaccttttgggggttgatgttgggatttgaccaactttttcctaggggcccctcagagtccttcaaattgtcataaaggtgcttattgctctcgtggtccctcatcttgtcctaggcatgtttttaacgtgagcctttactgaaaatcagattgggagttaatcagctaaggaaggtagtattcacttttgtttgctgttggcaagtactgtatttgaattagccctttcccaggttaggtctcagtttccacctttactaattagggggttgtactctagggaacctgcagggcccacaggttaccacttgagtgccaaaacctagattaatcatacccctagttttatgcaagcctatccttattgctatgtgtgtgaccttcttcttttccattcattgtgtgatcgtcttcatccattcattctcgaacagtgcattatttattagacatctgaaattttatctacttgctatctacagaagtatgtgcatttacttatatcggctcaactcgtcctccttcctctcctagtgttcagaatcctctaataattccttcacattttatatagctttgtaatttttatacatttgtatataatcttttggagcattttcattctagattaaagtcgtaccatgcctccctattgatgaatgtagttgtacttcattcatcttaactgctgtataatattccattgctaatgtgttttactaatgtgtattgttaacacactggagattccttccaggttggcagttttagcagcgtgctgaaatgaacatcccttcaggtcaggtgacatgggcctgaaatctcagctcctggggttaatgaggcaggagaatcataactgaaggtgtgcctgggctccagagtgagatttcagcccagcatgagctcagctagagcatctgcctagtatttacaaggtcccaggtttagtccccggtagtgacaagtgcaccattatacattcattctaattatccatgtgtttgtgtatctaggaaatgggtaatatgttatagtatattaacattaactgtaatatgtccctccacaagccccccaccccaccccaacaaagcaaaacaattttccagactagtttaatcagtttacatcactggaagccaaatacaagcaccgtgatgactttttagagcctgtctatctttactatcatcaggctcctttggccaggtaagtatcaaatgacactacctactgtcttcctgtctatgtcctagatcatacacagatcgtgaataaggttgactctcctcctcatcctgttcatccatgtcccctgccctgtgaggtttctgctctcaccatttgcttggcttttgattaggttgtaccatccttcctcctgctagatgataaacttcagagcatatttctatacttgtcctcttagctacacacatagcttggcagctttaccccctgtaatgtatctttttgaaaacaaaagtctttgattatcagtgttttagtcttagcttattttggcaagactcgcactgctcctaacaaatccatcttgaacccaagtcaagaagaacaattcttcagagatccactaatatttgtagattttgaccctgaactatgtatgtttgatctatttgcagttatttttatgtacgatatagatggtatataccagtgtagttttatcagttacagaatagatacttgggccaagttgtaccaattagtccttcttttcccttgctttatcagctgtatctaacttatccacaaattctgatgtgttttaattgttttcctgatttccctctttcacaggcctccataacaaccacacatggccgtaattattatagtgccacattgaatctggatctccgatatagcccacccctctgcctcatgcttcaaaaatatcttggttcttcttgcccagggggctttcattttagaatctactcatcaaatttaatgaaaacatctgctgccattttgattagaattgcattgactgtgtaaaactatatgtgtgtaattgacatctttacaatattaaatttatctatatttaggtttgctttaatatccccataattttattacctcacttagagaggtgttgtgtttcacataaaacctgaactgctaacttggatcaggaagcattgtgtctctcactctcatttccctccagtctctgacctttgctcaagacctctcatgtgctgtgttttccctgcctcaggttcattgtatatagaggtcttctttgccagaaagcccatgtgcctgctttttcgtggacaaatcattttattaaacaccttctaccctcttagaaaggtgtcctatcattgccctaaaatggactttccccacatcccgttattctctaccattgcttctcatctctacataatatgctatagacaatttataataatcacatatttatttgtgcctctctgtattgtaagtgcatgtgcgtgtgcgtgtgcgtgtgtgtgtgtgtgtatgcaatcccttatgtggtcccagtaagtacaaatgtattaatttataaggattagggtgattattttgggtggctaaagtacagtgctagccaagctcttcatcacatagacatgacctgtgaaatagacaggaccctatgaaaactcagggacaccatctcagattctacaataatctctacccatgcaattcaatttcctagccacacacttgctaaagctatgagtcttcatttgtaagtgtattccaaattctagagtggtagctatttccaacagacagaacacacattagtacttgcctgatgactaaaactgcattgcaaatttgaatcaaatctataggacttcttaatgtgtatgttcatgtttgtgtgtgtacatgtatgtgcaggtatgcaaagtatgcctggaggccataaggtgatgttgtgtgggtttttctactattctctaccttggtgtttgtttatatttttatagtgcttcttactgaacctggagctcactggtgggctagactggccggcccatcttcaactactctggtgctagtgtcccaccccctgtgccactatgcctagaaattagagctaaaatctgcatttaggaccctgtgtttccatagtagccacgagcctccatatgagatatgaactgagccatctccccagccctgagtgcttaattttttttaagtaatataatctgtgataatattagtggcattccaaaatcgcatccttctagtcagggggaattaggaagtgactcctatgtatactctttcacacaccagcatgttataaacaggtccgttttctttctagacaccggtatctctgatatgttgatgatcctgtttttacttttttactattccaacacgcttccatttcggtgtaatccactttatctcatttaatggttctctgacaacatagaccatgtcttactttgtaatccctttatttggggatgtgttgattgatctttctagaattgtagaacagaactgcggagacataagagtgaactttctttaaacagcttggtgaggagagtctgaccccttgccttgcttccttccccctcttatagattcgtcagcaggcagtgagcacaaacactcgtatgcttcccattgattgcagaactgtgctcaaaataatagctctctgcgttcaatagaaatggatctaagggaggagggtagaacaatatgtccagatagggatggaaatctataaactcaaggttagaagtctaggcatggattgctccttgttttacttaactttcagttggatatttcctaacgggagatggccaagatgtgtccttgttttccctaatgcccattcccatataagcactagtaatccaacagggaatgctcttccccccaaatgggtggggcctctgaacttgtttcctcgtgtcaagacacctgaggtggttatttccagtcagatgaggtcagcatccaggatgctgtctgctttcagagagttggtgtgtggcgaggtgaaactctaaagttatcagtctatctcgtggaagctgtttttatggcttcttgttttgtttttattgttgttttgtcttaattttaatgttctatatagtatgtaccagtgggacttttgttgttgtttgattgtttccttgtggagacagagtttctccgtgtagccctggctgtcttggaactcactcgagtaaagcgggctgactttgaactcacagagatcctcctgcctctgcttcccaggcactggatataaggcacgcaacaccactgcccagcatgcaatggaggtttgcctgcctgtctgtctgtctgtctgtgcgacatgcatcactacagaggccagaagacagtatctgatctcctggacctggagctagagacagctgtgagccatcatgtcagtgctgggcatcaaaatagatcctctgaaagggtaaccagttctcttaaccactgagccatctccccagccacatgcagctgttcttataataatttgtgcatatctttctcagtctaagcatatttcattttcaagtacttttttgcaatagttataatctttatggactttgtcataataccctcaggggccttagaattatggaccaggaaaatgagacagatatgaagctctgttaaaagccaccagcactatagcctactctgggttgtggatatccaatgcgaagtatagcaaaacaagacctacacatatcaggatcaaagtcactcttatcttacggttagaactgcaattagaatcaacatggagagtcaatgggatcagaagcattacaactgaattgggcaccaggctgtggttcttgatgccaattcacagcaggatccaagcctgtgagtggaggtacagagagcatgtcaaggccagttgtgtttctgtaacctgctagaaaggaccactcgggactcactcattgagacgccttttgcccagattccaggtattgagagaaacctttgaccctaggtaggatatggttaaagttgcccaggaaggcatgaagaaaacagaaactaagaagagaatccatgaatccccttctccctttgctgttttccttcctaatacagtgtgactctgcactttttggagccctttgggccatgcttcatgaaaactgacttaggaaaatagtacatcattcccagcaatagccaacggagtggtgacttttcctactgatgtaataagataccgggacagaaaattggagagaattgattcccagtttcatgatccagtcatgaaagtcatagccacaggagcccacggtggctcgtcacaccgtgtgcacagtcagaaagcacagtgtgaagggcactgcagcccagctgactttccccttttggttcagtctgggagccctaggatgctgatgccctcagttaagatgggtcttttgacctgtttacctcatctagaggatcctcacaggtgtgtctagagacttgtctcccaggtcttttgggatcccatgactttggcaagagtaagctttacagacatgtcattagctagaggtggcactcactcccttttgtcattttttttttcctactgagtcggtgtgctgtctgcagtcttaggatccagttctcaatactgaagcttacatgtctcactgtgtggaagaagggggtggggctatagaggctttcctgaagaaggggctggaggagaaaaggccacccctgagcacatcatgcacactcatcaggcccgaggatcaggaagatgagcatatgtctgagcatctcaggatgtctgaaggaccttgtgtgagcatccttttctgtatgctccttaactgcaccctcattctagaatcttagctttcctcaggtaatctttatattatagaaaatttagatattagagaaaagcacctataattcccccaacttcaattattttactttgggtttatctttattaatatgcatacattttactaacaacaattacataaaatttgttattgtaatttttcatcaagcattttatcacaatcgcgatgcctttaaagtaccatggaaacagtttatctttttttaatgactgcataattgtccattgagtgtgcattccctaacttacttttccatccctatattgttttcatgtttcagatacccatatgataaaccataggctcatggtagcaatgatgaaaaaagaaacatgacctccaaatcagattaacctgagttcaaaccctgattctaatactacttgaggatctttgaggcaaatgaacatctttgatgttaatttattggcttaatgtattaaaacagtgtctaggcaaagcaatcttcaaacccacagtgcttaaaaaccataagagttagatatattgttatctagctgccaagtgtccattcaaaatcatagctgacttttttcctcctctgggtaatgtgttttctatgttcaacaaccatacacacaaacatacacactacacacatacacacatacacacacacaccaacacacacgattataggattgaatggagtgagtacttcttgtaactcttggtacatattgccaaattgctctccaagtagattgcaccctcgtgaacatgtgttttgagtcttgtattgagcttttatgccaatcaacgagcctgggaatcaggcctttggcagcccaccagagatttatgtcagctttcatgataccctcagagcaggctgatgcgtgaagagatcattacacatgttggcagatctatttgcactctccaaggacgtgctaggaacactcttgcctcatcatcttctgttccctccccttttccttattccataaagcagaaagtaacatgtcaggcttccagtagtatcccaggggactctgacaccctatggaaactctgagctggataactcatggctaggttactacagcatctattattaatttcccctctgctatatcaccagacatgcccatttattgcccttccaaagcttcagagaacttatcttcaaagggaatagcagctcacctctaagtgtggattctgtgttcctagaaatgtctgtctcatggcccatctcagatctcctgagagctatggtgtccctgtccctaggtcacactcatttaccttacagtttgacaactgcagtgctaaactagcttccagccaagactttctgtcataccaggctgacctcagatttagaaacatttcctttctacttcagtattcttctaccctgcagagagtcttgggtcagcaccagaaccaccagtgcctccttggctgaggtgatcaaaatcaactttctgaaacattgaaaataaagtcactctattgtttaaaatccaccattgattccagttactctttagaataagatttcaactcttcttcgtcatgactaaggatgctcaatgagtgttccagtcctttatagctttctccatgcctttcttccatttatatattccacacagtccacaggtttccattccagccatgtcacattccctgctagacttctctttatctagaacatcatagatatagatatatctataccaggcaacttttattgtatcctctgtactctattaaagaatctcacactttgtacttccatactacctggatcaagaggtcatttattgttttataataacattttctaaattctgtactgtgtttctttacgcctacatctgttagcagatcagacatctgaaacttcctggaacatgctctgttcattgttaagtctcaggacctgtaagtattaggtcattcatagttagcagttgttcctgtgtccttccaacttgctgtcccttgcagaagattgactcatagttcctgctgtgctacattcctttcttgcttctgttcctctggacccattccctgcaggacccaggagccctatctttgctgtgttatgcttcctcttaattggaaatgtcacagatcctctcaacgtccccttccaggttctgacacctgtcattccactcttctctacctctgttaccttcctcttccactgggctctactgttttcttcaaatgacatataggttgtaaataccactcaagcccattggtctcagttattcatttctttatggaagattctgttaaaaaccattatcattaccaagcaattatcttatttagtcctcgtaattggaaagaggaattaagttacctacgatgtcaggactggtgtggccagattgagaggaggattctgtatgccccagtaaaagtagcttcatcatcatggttcagtttgcaaatctcattccacttgaacacttttgcagctcaatggaggtattcagccttgtccctccccttatgcaactgaatggcatgcttgacctggtggctttgggagggctctgacacaaatttctgacacaaatatttgccttctggtctgtcagcttcaaatagaaaattgcagaaggcaaatttgggataatatttttttcattactgggggaaagtttcccattccaagtcaattttgaaagataaaaaaaaaaatcatttccccacatctgcacagtagatatcaaaacaggcagtgctctctgaattgcaaccacagcactgcataaagtttctccttctcaatcagttattaaaaagaaaacaaactaaacaaacaaaggaaaacagccctggcctacttgaatggctccttctctcttcaatagtttagtagttcagtgactatgttccatttgcaacttgaatttggatagtgaacactgtgtgtttaagctattcaaggcgatgtttcccaaagagttgtcttggaaccctggtacacacttgtggctcagggtttttaatgatgtaatttttgagtttcccatcccagatttatatgttgaaacctaattcccaaagtggtagtgctgccaagtagtaagacctctgaaagactaaagagtaagtagatgatcaaggagcttccccttcatgttagcattaggttctttataaaacgtttctggagaagcttggtcacactttatgccaatattgacatagctggaaggcaccatctataaggaggagaactcttagcacactaaatctacaaggactttgtcttcagtcttccagctcccataagtataggcagaacatctctgctgcttgagacgactcatctgtggtagtttggtgtggcatccctaacagactaagacagaggtttaaaagcttttacctggaaaaacacttaaagtgaaataaacggtttgctttatttttgcttattcttcaacttccaaagttcttttagtaaattgttgccatgcagtagacagcatgggatcagcagaggggatcaggagggaagggagaagggaacacattgcattccaggcaaaggacttccaacccagccatgaagttcctgagcatccaaagaaagacaggttttctccttcctgagatctactaaatcagaaactctaaagtggggccaggagctaggaattcaggagataggagtgcaggagattctttgtgcaggtgtatttgagagccactgtgggaaatcccagtggcctgaggtctcagatttgcttgggttttctacttctccaggagtcccatgttctcccattgcctgctggggtttctccctctggcattagctatcatgtttctaagagtaaattcaaaccactttactattaagtccacctttctatccagcatgttttctgacatttatgacctttgtgttttgtctctgaatacctgttttatgctgtgttctgccaatttcaaacagcttactgctgccatcttcttttacctctataccttcatgcacattaatacagtgataaattgcttttgaggctcctcccttcagctaatgactgtttcctactccaatcaactcatctgaatagttcattgctgcctttctttttatttatcatgctttattgcatgtatttgacaaaagtgcatctatttaagatgtatatacacatacacacacatatatatgtacatatatatacatatacatatatacatatatatatatattctcagatctggttaggtttaatatattacatattatatatatcacacatatatcatattatatgtgtgtgtatgtttgtattgtgaagtgactaccacaattgaacaaattaacatatatatcccttcaaacaaatatgattttttgtgtatgtaataaaacccaaactcataaaggcaaaggatagaataaaagatttctgaagctttgtggcagagtgcttgcctagcatccatgaggttcttggtttgattcccagtactggaaagaaattaggttgcctaccaccttcttcaatcagattttgcattccagagaaaatatgccattgcaatgactaacttgcattaaactactgtgtgtgtgtgtgtgtgtgtgtgtgtgtgtgtgtgtgtgactaaacttcaaataaaacttatattcatcaatgtttccccaacaagtagaatattcttagtggctcctagtgatactcatgaatgcatgacacctgtgtgatgccagtcgactttcccccaccctcccctaagtcaaacagaagagctagagaggtaagtgataaagagctatggataagagaagtgcctcttttgactttctttttccacattatctgttcatccttgtttctttgtccagattcatcctcttccatcagagacatgcacatctccttaatttagaattcaatctggaaccagctcctggtgtaataccttcatgccatcccgactcccttctgaattcttgtcttgaaaagaaatatgttgctaagaactgttttatatttgtgtccttatctggagtaaaaagcctatagctacatggcaaaatctatttcatgaagccttgggcactgcactttatatgctctgatatttgtcctctccccagagacagacttgcagtgacacaaattaatcatagccgcttcagctacatgttttaatgagtaaccaacccaaattagacacagagatggtcatgttatcttgaggtcttaggatttagatgtggaacctttcttaccttgttccccaggaaatcctatcagacaggtattatgctgtcgcagactgaaatggaggtaaaggctggcaattaccagccctgttgttgtcttctgcctggaacttgggaatccactggagggaagcttatattcggatccacgggagtccgaggatgacaatacccatggtataaccttggacttactatccaggctttgttaagtttctttcagtaaactgagactatgtttttgtccagagaaagtgcacctgtgacattagactccagcagggagaagcaacactttcattgttgaggcttggaaaacctcagctgtgcaaagtcacagtaacaacaaaactgtttttaggagtaaagaaagcagggctctttgaggatggctccttgtgcgtctcagcaactgtgggctaggttgttgttgcaggtgctaactgaactaagattgatggcgcaggggtgctgttgaatggaagctttgggcaaatttttgatccatagtaacaagttagccatttatattgatacaatataacaataacagcagacaatgaaagcaatcccagtcacccagactctcccatttttctttcttcaagtcctgctattccttgtctccacgcatatgaaatttttatgtacttgtaattattgcatctttataattttaaatgcttttctctcacttaaattataccgaagttataacattagcattttaatggccacataatgtcccatcaagctcactatcacactttatttaaccatcccccgtgacactcacgtagcctctggtctttaccccttgccaatgagatttccatggacatgtccaggaggtttttttgttctagtatcaaattatttcctttaaagaactttccagggctgttattctagtgtcaaagaacataaccatttggtatttctctgggttgctctgtgcccatcaatatcacgtgacatcaagcctaccctgaaaaagaggcctgtaactgtagcccctccatcaggaagtgaggtaaggctagtggatacctgggcacaaagtaatgtttgagactgaaagttggatccacgctgaggatgtggtaggaggaacaatggatatcataaaaagagaaaacacagtctacttttgctataagctatggacattgctctactctttcttctgtccctttctttgtttgtaagtgagcaaaatcttagtggctgaaggttttgatgcactatgagaaggaagcacctggcataacaagttctttctttatatcctttccttaatacgtacttgagctgtgtgtacacacatcattagatttgcagtccactgtaaatccagcatggtcctctctaaagacccttaattacatctgcaatgatgcctcttccaaaccaggtcccattcactgaaaccaggtcaccttcactgactcaaattggacatatctcctgggacccatccatcatcccattacccagggcaacttgtcctttgacaaggtgtatgtggctggggaagaacttggtggaaaacgattgaatatgtccatattaggagggtgagcggcagcccattttcatatgaaatgggaggtaattagacccttggctctgtgtgggtttatgcaaggttgcctgactccaaagggaatcaggagatagtaaaaagcatgcctggtggagtaggaacagatgcctgggctaatgttgacccgagtttgggagagctatgtgttacctagaggagtaaagcagtcaggctcaatactaaacacagagccatcttttctactcttccaaatctctccctgtttcaaccccagacacaccactttatactgggaatgtcacacctctcagcaatcttcaatcccaagtcctggcagtagagggaccctaagagtcctagaacctctagatctttgaaacaggccacatagggattggcttcataaccataaaagttctgtccatttcttgaggcacttattgctctgggcatatactagagtatctttcaaaagttggataatgggaatagtactgctattcctcagagtactaaggccactagctgaggtcccttagcagttccagtgagatgacaagaattcctctgtcaagtaagcataatgtagaaagaaaaggaaataccaaaatataagcagctactcacccagataaggagaattgaggctaattcttttccttttacctcttgtgttctctgtctgtctattggtctatctatcaatctatctatctcccacaaaagcatgaattttgtttgtaattagagcaaagaagtgtttgcattggggcaaaggaatgtgaagacattagataaaacacaagagctcagagctttatctgagcagaagccagctcagtgctcttggccaagataatccaaggtggagattcaataagaattggattcaagttctcacataaatgtgttcacgcaaggaccctgccttagcatcaaagttatgcccattggtaaccaaattatctgtaataaccaaaacaccagactgtcacacatatgatgtgcaaacttgtattagcatgcaagggctgccatcccaaaatagcacatgctggatggctttaaactccagagatgttttctccaaactctgtaggctggagttccaaagtcaaggtgtcagctttgccagattcctccaagtgtagcagggagaatgtgcaccatgcctcctttttatcttaatagattagtaattataaaatttatgattatttattcatttgtgtgtgtgaggggtggtggcacatgtgcataagttagagaacaagatgtggaagttgaatatctccttttagcaggtaagacccaaggacagaattcatgttattagcttgaagggcaagttccttttcccactgggccatcttgctagattagtaacttttaaatatatttaggacttcatatattatatgcctgtatgtaatatatgttttgatcatatgcaccttctgcccatccccaaatttcctcccagactagtggatccctactcattcacactcttccaacttcatggcctctcattttctttcttagaacccactgatagtgtttcttaaatatattccttttgttcaaaagaaatagaaacataatatacttcatattagtctgcagcagagataactactaacatactgtggtcaaaggaatccatgccaattttttaacttcccccattgccagtcttggcattccttggcttgtggccacccccacccccccagtttctgtctcatcttcacttgcctttctcccatgcatccatctcttctgtgcctacttcttctcttcatttgagtgctacttgtattgaatgagggacctccatgatgtccacattttaaccttactacctagaaggacctcacttcctaaagcacatagttcaactgacaatgaaatcccactccaacaattcccttcaggttcactctggggcctatgttagcagacagccacgtgtacatttgcagaacgacttcctttgtcttcagcctcccttgcatccagccacacacttgttactacttctgaccaagacataaacactcaccagtggcgtgttacacttgtctttcttgggtttccttgtcccttaaagcttaaacatctcctttccacaaggctcaagcagcagaggagtggccaacatcttgtccacatattctaaggaggtcaacacatcaacttgcatcatcttaggtcccagtctgtctcacctctgcctatctctcttggtccttgactgatacttaatgtcagaagaactgggaagagaaatgatgtgtaattgcatacaagcaaaggctaaaaataaattgacaagattaattctaagaggcaggcagagaggaagaatgaagagagagagagagagacagagaagagaagagagacagagacagagagagaagacagagacagagacagagagagagacagagagagacagacagagagagaagacaagagggaaaggagttatccacgggactggctttgagttctaaagtttacatccaaaccagggatgggtgggtgattgggcatagagtggagtgacagggacagagacacaaagttctaagaggagatggtttgcttcagcgtgatgccaagacaagaaatgttccaatttcctccaaaattctaactcctgctgtcctagcaattgcaggcacctgtgaggtcactgctcatgttcctttctgctcagatccattagatgcatctacagaggagctcggatcttattccacccctgatgaatgtgctctatctcagccacatatattgggtgagacagaatgacatgaagtagttcgaggccatcatagtgaaaagcaggctcatcatagtctccctgtggagactatgggaagatcagtcattcattctttaacttgattcttcaatgttcagtgaacacctatggacagcaaactgtctcagggagctaggaaacatcagtgcatcagtgagccaattagacaccaaattctctcctccagaagctcatgcttcagtttcagcaggaagcatctctcacgaaatcttggtgagccttttccaaggcagattggtagagtattgattgaatggcctccacctttgtcacaccggatgtttcctcctacaatggagttgagaatagtctatggccaagacttcaaaaccaggcagtcctagtttgatgctccaactcatctagcatcattgagtgctaccacagtctgcagctgagaccccagaactctttgtttccaccagtataatctgcattgtctctgatctcatctgatttagacattggttccaaggatgagctgatggctctattcttctcattcctttattggctgtaaaccacatgctgattacttttgtcattccccagtgtttttgttaaatcatttataccttgtttctggaaaggtttcagacttctgttcttcactgtaagggtggaatattaagaaaagagatgaacatgaggtgttctgttgtccttagtgtgtatctacaccagacctgtgccagttctgtctcttacgccagaactttccaataggaaaatactgtgagccatgtttgtgtcttaaaagtttctagtgtctgcactaaaacataaatgaaagagaaattaagaacatttattttaatcatactttacttaccacatccaaatagtatcagttctatgtcattaatataaaaatgttgataagaaactttacattcccttcccttctttgtgctaagatttaaaaacatggtgtgcattttacacccatagtacatttgggcaaagaataaccacactttgaatgattggtggtaacatttcaagtcctcatttgttcaccatgcacgcaaatgtcagctctagtttaatgagagtaaaaaaaaaatggtgatttgtataaaaaccatggggcccctttaatggatcaacaaatgttaagctcttccaacttttgtattatttatccattttgagagtgttaagaaggggccaaaatacacatacgcatttaacacctgataaataacatgttcaatgcttttattagctgatgtttcctttgccattatgacattaatacttccattaagatcactctctttgatggatcaaattatttcaaaagatatggagaagccttcccatttacacctgtgggcctgtcttcactgaagaatctttatggatatattaaaatcataattatatcaccctgctgaattatggattaggttgggtcccaagacaataacttccatccatagaataatggggagatttgaatgcaaggacagacacattgggggtgaaccttgtaagaagagaggcagagagctatgattggtgcttcagagaggaaaggaatgtccaggattcctggcaaccaccagaaaccaagaagaggcaaagcaggaccctcccctccagccttcagagagagcctgatctatagaacccagaagttccagaaaataggtttctattggttgactgcatttgcatatgaccatatcttttcttagcttgctgctacccttctctcctcccacatgctcctcatcccattccacctgggcattggcctccatcattactgtcacagcgctgttccaggtcacccatggtttatactccataaaaaccaggctctcctgtagagttctggcccctggtacaacagtagtagatgcaaatctaaggaagctgatcagtctgcaagattctgagctccatgggccacagagtcacagagcttgcctctgaatgtcagtgtcctcctcagcatgagcctaaacttccttatagatggacaccaattgtatggtctggccaagaagatttccaagggatttgtggatgagcctcccaaaatgatcgttactatagctgagcctcacaaaacgatcaggtggcttgttccaaaagaagagaaggaaaaaatgaacagcctcttttgcatttagcaggaaatggaaaacaggaaagagagaggggtctccatgaagtgggtgaagcaaccagcagcaggaaaaggtaggatccaagagggccagagggtgtcaggacaggaatctggctagcctgcctgctgtcacttcagacctggtgactagaaaccactccctcaatctgccagatggaattggagcttcactccaatgtgaatttgaatcactgtacaacattgcaatattttatagtaagtgttcaactctctcccaggactgtttgatagaacttctaggtggactcttggccaccttttctctttctgctagggtatgggtagatgacctttgtcattttcactggagcacaacgtcatcaagctgatacctctaagtctctatcaaaggaagaagtaagataaccccatagcccaacaaataaagctgttggtagtcattactcctattgaaggagtatgttattcacagcgattatcgtgtagagttgatcagataacacactttctttagcttggtgttacatcaaaatcccttgactcacattgttagtgtttatcttacttggtgactgtgaaatatttcatcaagctgacaccctaatctgcttacccaggcctctcttattggatacagttaccctaaccagatagtgcttgtgtctctgtaacttgtggatcaagagctgacaaagccaacacagccacagtcagcttgaattatgcataggaccaggatttcattcatttaatttcagggcagtgtggtgagtagctcacacacacagtgagtagaaaaggatttttttttaatgtaaatacttggatttgataggcttgtgtattattcattgtaacaaatatctacactcctggtgtcttaaccatatgtgtgtgtgtgtgtgtgtgtgtattatataactatatataatctatatgcacacacacatatatatataataacataaaaccatttctaatccttctagaagtcagagcctaaatcacattgccaatgggactagcttttctgtgacctcctccaagtcccaagtcctgcctgtgaccctcagtttcttttgatttgtgaataaatcagggcaccttgtctccaaggccatcttactcccttctgtaggtttcctttttcccatggaaggatgcatttcactggattaaagctcacctgctgtggaattctctcctcagaaattcataactcactagatattctcatgtggttatttttctagataagtggtagagaatttctgtgaggttgtaatagaaatccccagcggatttatatcatacctgcgataaattcatagattaacttagaaagaattgatactatttgccagattgaatttcttgtggccttcataaacctttctccatttctgagtaggattttgtggttttattcacatcgtttcttcacgcagttatgcctatttcttgttaagcttgggcctatcacactgtttcttcacatggctaagccatgggactagctaggcatttcttgttaagcttgggcctagggttgctcttgttttgttttgtttttgtttttctgaatttttttctatttataaaatttcccttgctctaccttttcaaattgatcattatttccattgcatttcttgtttattccgtgaagctattagctttttatattaattttgtaaccagccactttggtaaatgcctccatttcttttctagtatgttttacagatgtttcactatggctgacttgcaaacaataatgatttcttaaaatttcttttttaacagtgagagtgccttttatatcaatctctagtttaattgctttggcaattatatctggaatagaggacatttcctcttgtcctgagtctaatgtaaaatgcttggattatttcaacattaagcacgagaggaagatttaaatatgagatagctttttcttttatcatgttaaaatccagtcatttatttccattttaccaaaccttttatcagggatggatgctgaatttctttaaaagcttttttagaaaggcatctattgatattcatctagcaaatatttggtgaatagaggagacaggaaataaagtctcttccttcgtgaaaagtgatggtccttttgctagcgagaagcaaattttcaaaggacacagtccatgtgagaagggtgcttctcagaggggacgccatctgcagaggaggttggcatgcagagccttgtgggagctgggaaatctattgagcaatgagatcaaaaattatcaggagattgtctctgtaacctttatttgggctttccatttgcctttcaggaaaatttgttaattcatgttttttgttcgtttaggttatttatttacttatttatttgatgttcgttaagaatagtgacgaagtcgagcaaatattactgcaccctgtcactttaagtttatttttctgtctgattacttgctgttgtttcataaataattttgtgggtatgtttttaaattaagtttttcaagctattgttagaataaaatgtacctttcctaagagcagtttatcatgggataatgtcatgcccgctttcagtataaagtcaaagaagtacaaccaatatgtaaggtaaaacatatttataatgtccataaatgttccccgtgcctttgtagtcaacccctccctcttcctggccctggaaaccatggccctgacttctgtccctaaagtttttcctctttcaaatatgtcatgaatggcatccctctgtgtgtgaccttttccacccttttctttccaaggccacacaggtctcaaggttgactcactcaggctgttgagcatatccactccatgttgtctctcttttctttattttgtccatctctcttgatacctgtcaggctgggttaatcaactcttagatttgttttattctgtaatttttcttcattgtctattttcaattgtaattcttttgcatctctttcttttgccttcttttcttgcttttttttttgttttatggttttttttttttgtttttctttttttgttttgttttgtttttgcttttgtttttgttgttgttgtttttttctcctgaaaacttcacatagttgtcaaatctttctctgtttctgtctctgcatctgcctctgaaggtttggagcccattaagccacttctctggttttcagttttgttttagtttctccctatgagtatttcccctttagatactaatttggcttatccagttctaggcatagttagaccacctgaatgttcctttccaaaaaaatgttctatgttctcatttccctagtatctttttctttgatctatggattataagtaacatttgtatgaaaaattaaaatacagatagactttccagatgtatctcttttgttgctttttacttgagatacattgtagtcagaaatcacaccccacctgatcagggttcctttcgattcctgagatgtggattgcagtacagtatacagtttctctgggtgactttgtgcagtgcaatagaaaggatgcgcactctacctttggcaggtggagccacttaaaattaattaggtgcagttggtttatagctttgctctgatcttctcaaacttaatgattttctcttatttactctatcaaatttcaagctcagttgtggctttgccaatttctattctctactttgctttctgcatttccagtgctggacatctttgtattgctttatatagccctgttaccatgtgcatctatatactttatattcttcttcttatcagttgttagctcctgaatgctattgtctgcaatgaggctttgttttaacaaccttgtatatttctcttaatgtattcttctcctaacttctcctttgtgaatttctcttcctgcttgcctaagaattttgttatgcctttcccatcaaggttttagtttacatgttttcaataatttatctctactcttttggttgtaatgaggcaatgcaatattcagttgtggcagtaaaacttagatttttggatgaaacacaatagttattcttttctgaaatatctagaatgaactgtgattttgacttctttgaatcaaattttgattgtatttgtttgtgtatttctacattcataattttttaaaacttaccaagtctcagtcagttattgtctgatctgtttttagaattaaccgacttttctgtacgcccaagttggagtattgtgatggcagctgcaggcaataatggacaaatgtgtgtcacagtattttaacaatactttacttacaaaaatgaaggaaggcaggctttggttcctgggccaaaatcaacactgaaataaagaaatcaattatcctctaattcttagttctcttctgtttcctttaatttttattattctgaagctaaataagataacaaattaagatataaccacagtgttgtggttttttaaaaaaaacagtgtaattattattgtttacggttttactatgctaaagaaggatgctttcacataagtatactttggatatataagtatactttggatatcaaatgattccacagtttcatattatgtcatcttccattaaatgacttccagcatcctgttaatgcctttatagcataagaaattgttaaagcctcagtttatacaggcaaagctttcatgtgaccttacccttgactttagtccaacgtttcattgtgctgttacagttcaatgacagttgagatttactagatcagatctattagtggtatggtttcaatgtatttctccctactcaaatgtgaaccttagtcattgatgtgacagtagggaggcaaagccttagaaaggttagtcatgaagtattcctatctcatgagtcagatcagcacttaggaaagcaatatgaaggagctgtttgctcctgcttctatgtgagaactcaacaagaggagccatatagggaataaaagagtagaccttatccaacgcacaccacctccatcctgaacttcccagtttctactaatatgaagacacacatttctcttgtttataaattacccagtttccagtcttttgttacagcagcaaggcagatgaaggtgatcacacagatctttcttcttattctttcatgattgaaagcttgttgattggcatgatcattggacaatcaattgatctttaatgctttgttttgtagtttaggggataaaaccaagggcctcgtggttttaaacaagtcatcagatcccttttacatccccaactctgttattgggtttagttctgtgatgattcaatgtatagatggtaaatgacatattcttaacacaaataaggacttcaagacacatttaacacaaggagtccagttttccatcaaagggaaggggagatattttacatttgtaccttcaagattccctaaatacatttcctaattttgctagctgcaaaatagatatttttttcttaagtatctcaagaaaagatcatctcgaatatttataaatctttctcaaataaaaatgtccatgggttcaactgagttaaaatagcattctagttactaaatgcattgtcatagagtcctgaaatttctattctgttccaccaaattatttcttgtgcttgggcagacaataaacttttattgtcactttaaagagaaatggtgtctccccctactttccatagtgttctggatagtcttttacatagattgtttcacatagactttaatatcacctggaagttaatcttatgaaagaaaatcattaggattctgaatgaaattctgatccattcatgtactgacttcggaagtattgatttatttacaatttagagtcttctcattcaaatgtatggcaatccccaattcttattttggatcatggccataacttttctatttacaccaattctagccaaataaaccattgctatataaattccaatagttttataagctgcctcaaagtttctaagtttataatcacaccatttgccaatgcattcacatatgtatctgctgtttctgtattttcctgagcattttccttactgctcatggaatgcattggcttacgccatgagaataattcaaaataggaacagaaatgatggccaatctcattcttggctttaaagcagcttcaatagtttacatcttaaacctgacatgtactgaagacgttttaaaagcctttttttattctcgatgcccttcaatccctgttttagttaaagttttcattacgtgtgtttaccggattttatctggttcatcttgacaaatacatcaaagaagacttctgtgacaaataaccaagctctcttaactcaaattggcctaagctttaacaacaggatatgttggcagagggccagcttgatagaacgtctcaaactaggtcaccaaggtctgataactcttacagactgtcactgtggacacccaaggggctgcagcaattcaagagtccatgtaattcatttcaaatccagggctagggaaagagctggtgttcttgctattcctgaaaagtgaccatgcatttcactcacctcaatgctgtcctgggcttatctctgaatccaaaaagcagttctaaccagggggaatataatatactgattgactcaggtgtagatcacaagccctaccctaagttgggtacagtgccttcttgtctaagtctgctgagaggagaggggcaggtacctctccagacaaaagctttggtgtcagttaccagagtgagggaagagggtggctcaatgacatgacatttcaatgtctattgattcaaccagatggctttgcttattattctctggttgtaatgcaagtgctgtaatatattcgctgattgtgaaccattcctgcagcagttcttgcttagtcatggtttatccttttgatgtgctgacgaatgccctttgtttaatattttccatctgtttcataagacagaattgatgtctcgtctaatattttgtcttgtttgtgtcatatcttaagatcatctttgatgcataaataaatgaagaatctttgatttaaatggactgagaaattttacacattatctgcacacaaataaggatttacatattatccacacactaataattagagttgctttctttaaaagatatgttttaagtaagttgggaaaacaggatctagatttgatgggatttggtaaaagatgtttcaatgactttttaaaccaattctgtggtttttcatcttcttggttgaattttatttccttttttgtctcaggaaaaacattactctctagttttcaaatttgttgctgtggggttatacataaaaatctctttaaagttataaatgcatttaatctttttcctacttgtggttacaatgtcctttcctttttaatattttatattacactctttgtctttgtttcagccaagcttcattttctcctcaaaggccagctttatgtcttaattgcctctgtattatttgtcattgttttaagtttgtgtatcctcctcattttatttgttttgttatttttccttaatatgtaatgttgaaatccttggatcacattcccttggatttatctttttgctacttctaggtctttgggcttgaaaatgtctctcttcatttcctgggtttagttcaccttgtcagtgggatattctatatgatcttgggtctgtggcttaggataaagtttcttcacgtactaaataaataaataaataaataaccatggaaagagtcaaactgtgacttgtaaaattgctcctgtaacagattgtatagaaataagaaatttaaacgcacacccatgcacacatgcagagcatttatgaatatagttcagtgtacattcagttaaaatggtcactgtgccctgaatgatgctttgctgcataatgtgattttttttcccttgatctctgtcttagtcactcactcattgctgtgacaacatactctgaaaaaagcaaagtaggagaggaaggatttgcttgttttgttgttgttgtttttgttgtggttttggtttagtttttttgttgttgttgtttttgttttttttagcttagttccatagggatacagacaatcaaggaggataagatatggcagcagacaggaaaggcatagtagcctttcaagtcttcttcctcctcctttttgtttatataccaaataattttattagtgataagacactacattactcaataaacattttgttgtgttcaatatgcacatataagaacctcatctctggtaccagtatccctctagataaaccccatgccttcttcataggaaatctgcaattttttattagatattttctttatttacatttcaaatgctatcccctttcccagtatcttctctgaaaatcccctatcccctccccactccccctgctccccaaaccacccactcccacttcctggccctggtattcccctatactggggcatagaaccttcacaggaccaagggcctctcctcccattgatgaccgactaggccatcctctgctacatattttttatatttagagccatgagtcccaccatgtgttttctttgattggtggtttagtcccagggagctctgggggtactggttagttcatattgttgttcctcctagagagctgcagacccctatttatctatagttttcattgaaagcagttgtttctccatatgatgtattctggaagaggaggggaaagtaggggaagcagggagtcactactaatactaaggggcatttgatgggtcacacagaaacctattactatagaagcttcctaaactatatactatacttatatgaaagaaatcaaaatggagtcaccaaataataagagagataaggccccaactagacatctcccatcaccaaatgaaacatccagtgccagaaatgggttaaatttacttgagttgttggcaaaaagggcctcatggaaacccctgaacaactcaggctgccctgaagaacttgccaaggctgttgattgttctctacaagctgatggtaaggccccaatcgctgaagataacactcccatatcttattggacatggaaaattcctgatggtgcctaactagagccttcacccattttcggctgttcacatttgctcacacactctggaagcagaggatggacagaaagtagaaacaggctataaaacttcaagaactaccctctgtgactcacttcctctagcaaggtcccacctcccaaaggctctgcaacctccctaaacaatgccatcagctggggatcaagtactcaaacacatcaacttatgggagcatttcatgttgaaaacaacaacctttatatgcatattcatttttattccatctacaaagtgtaaatatgataatgctttttaactgctaaaaagattaaaatctcacgctcagctgaatttaccaaattttcttcctatttgcaataatttttggctcttgtgctcttacatatattatcctagttatgtattacaaatgtgttcttcatcccccatggctgaaagtttcttgttactttagatctttcacataaagaactgttaagtccagagacattcttcaagccatggagaagagacttgctgttctaagaagttgaaccctgaggtccccccaaagtgttatccaaagtcataactcttgaatttgatggacatggccactctctaacaggccaaatacttgtaagtaagttcactatgattgaattgttttctatgaaactatcaacctagctcacttaacatgggccccaaatggaaatcacaacaacagtaacaacaaaaaacagttcctgttttctaagaatagttgattgagtgttgacaggtgtgtgaaggttagttcttcattcagtgcaaggacctgagttctttctggcatcttcttgatttctcagggaatttcagtgcttggcaggatctgatgggatatctctaagtgagaaagagtgatggatttcatatgtgtcttttgagccaggatagaagtcagatgaccctttccacctgtgttccagtagccatgaatcatgcatatggccatggctgagggaagaactttgtctaaaaatatgcccagaacaactgtgttcagtgaacactagtcaccctctgttggtagagttaggtagcgaatagctctaagtttgaataaagaggatatagcccacatgaacccagatcaggatggggctccaaagtgggttttgatactgagataaaatcccagatggcttggaatgatgaagaggtgggctcctatccaaaaggacatgcacagtctagtatggctataggcaccagaggcaatagaatgactccctatgtcaaatgatgaaaacaggttgcctgtaccaatagggcatttagatgggctaaatctgaggcaagataaaaacctggttctcagacataagcaattctttaaaggactctgtagacctgataactattgatcactgtaatcacaaagtacctggtatatttgcatactgatggggttggggctcaataaaaagcaatggacttctctaaaactaaaatttaacaccaaatgtcttaatcaatatatcaccaaaaaacttcaattacaacccatgaaacctagaacccacgttccaccttctatgaagctcttgagaaaaatgtgtatctgtggcaccataaaaaatttaaagtccaacttttaaaactcacttgcttacacaaccaaccactttagaacaacttagaattgtaaaaatagaaaaacaggtaggtaattaatacttgttcgtgatgaaatatcaaaaaaataattgaaataatttataatgtgattcacatgtcaagactgcagatttatgcaacaaaataagtatcatgtaatataagtcacatataacaaaattttgtgtcacgtgtgactgaaactatgaaagaccgggaaggggagagtaaatgaggcaaggggctaccacaggaggatatatggagttgctactccagagcaatcaaactaggacttttttcctcttcttagatatgcttcctaaattctgcatcatatacttaataatgagacaaacatgttaaaattgcatcactgtcatatccaagtattttcatattttttggattcacatgatgaagccatatttcaaatacccccacacttgggagtaatagagaaacacgtacatacatgcccatgtacaccacagccctccagagccaaagcagaggcaccatttgtaacagatgacgagaaatcacagaggtttctgagattaaatggcctctaacccacagcacacttcattcacacgtttgcattgttagaaacaagatttgtgagtccccttttttcttgtgtgcctgaacctcaccatttcatggatgctgtatataattggatataggtcattgggtcagactagatcctgctctgaactgggttaatactggagtctttggctctttcacacagtttcccttttactgtttgtaatgctttatcttccagaggcaaatgggacatctttctgaaaatgagcatgtaaatctctgcatttctcacaaatatgttggttgcctgcttgtctccagcctcttgggcccaattagctgaaaacagaccctcatctgttttgtcccaggcatggatggttccaaataatagaaacccatccacctggcttaatcaagagagaaagatttgctggaaagcatgggatgaatcccaagtctcaaatcagggaggctgtgggaaaagcagcactaacctgagaaactgagacgtcgacctcacctttctttctgtccccttcatgttccctctgccttctctgttaccctgtttcattcagtccctagtccagtcctcttttctctggctcctatgctatgtcttctttacctggactactgtaacattctgcatcccatcctcttgtaattgttcttagcctgtttggagtgagatcaccagacatcacaaaggatatggctatcccaagacaaaacgtgtgttcaccagctttgacactgacagcgtgctgcctggccccctcagccactctcctttaagacagtgctgggcatgagagttatagcgtgtgagcactacaatagtagtactcactgctattgtttaaagggttagagtttggtgagacttgtctatgttcctgtgtggtatttgatccagctgactctcattgctacctttgtattatctatgtgtgtgtgtgtatgcagatggttctcttacctacaaaacagagtgtagaaataatagattctctttacgtgatctctactatagtaaaacggattgggagaaacatttcaaaaacaacttctcactgtataaatattacactcttaccacttttcccccttcccaggcttcttaccaccctgccagggtttacaccaagtgttggcttggttctgctgaactatcagggagcgttcggaagtgatggtattcaggatggggagatagaggaagaaatcattaagttcctgggaaattaaacctatgatacattaaaatgccaagcctgataatgtttttaaataaaggttaatttacttagtattttaacatttatatttgagttattctaagctgaaatgtgagtcagccaatctgcttttctaaacttctgctcttagattcctgtcctgataaaaagtagatactatgcttctgagccagaaagtggtggtggtgaggtatcttaagcttcgccatctccctcacatcccacatccacctccttaccaaataccccttatagcttcatctgttaagccttgcctcaactacagaaatagcccagcatagccctaccaactctacctgctcaaaatcccttcatggttttcttctctctcgggcttgaatacctagtgtgactttccaggcaccttcttctgttcccatccttgatcatgtcagcatccttgtcgtacccttaatacaccgtaaaaatctagttttggcccttgcaatcaccatttctttatagagataccctcttctacattctttctgccttttccagtatcccttatccaataatatttggtcccttgatgttgtatttttgaactcactctgaaaggggtagtcctgtcattatctggcttctcatcttgtgaatatctttctgaaatccttttcaaacacagcagggatttaaataccatctgctcttctggcagaacaccttgaaggcagaaattgtagcagtcacaattgtagccttagaatcttgcacaggaccaggaaaaggggactctgataaaaaaaaaaaaacaaacaaaacaaacaaacaaaaaaaaaacttgaataaatgaatcaaccaatcagtcatgtgtttccatctagatccattcttactagggagagggaagccatatatgagtcccatatggttggagtgatatatgcaaatcaaagtccagcattttgctaagatgccagcgatctgttgtactctgccctgtagtctcattaataaagagagcatagagtccaacccaagatatgctgtagatatgactctgactaaagatagagacatgacatgctttcagatcccattgtaggttgatatgcaactggatggtggacacattccaaagtgagcagggactgttttcttgactgtctgtaatgaccatctggattcaattgttaatgttcaatcctatttgttgctaaggcaacccagttataggccatcctcactttaccaaaggtgatattgccagcgtcatcttataagtcagatttggaaagacacaatatattttcctaggtgaaaagtgatgttaatggtgactagaacctagagaattgtatttaactcatattgttgcaatacttgtgcaaaatgagtcagtaaatatatctcatgatgcccagctcacagcaatattttggaacaatctggtcatgagaggaaaatcagcctccttccaatattctccaaaagtggtttgagcctcaggatatcctgtgtttagaccgtaatttccccaaagttgtttgaatgcctggcttatcctggaagagtttattaggatccatcattctagtcatatgcacatcaaaataaggatcttttgtgggctccagaaatatgtggacttaaagagaccccaccctggtgattccagcattctttgtgtattattacctaaacctcttcaatagctctcccgttgccccctccccacttcctcggcactggggatgccttcctacaacactgtcaagttcaaagtcacagttctataggaagttaccttatagggtaccataattccaactgatccagttctgatcatggtatacttggaagatgctgaggagtagacttgctttgctgatgctcacaggaacaggctcttccatctccactaagggagaaggctgacaacccaaacacagagatcaatgctgccatggttacaagctccattatcaatatcatgggattcatttaaaaaataactaaaatagctctgtttcttccttgttcttattacatttggtcagaggcatgtgtctcaaaggcaatctacatataagacactccatcctattggtgggatgcctccccagatactaggagagtccatactatatcactgctctgaccatcttgatttttataataaactacaatgatagagtaatgaaccactgttcatgactacgtcctagtggagccatgtcatcagaccccagaaaactcagacaaatcttaaagaggtacctaatttaggttcaaaacaggatcctgagaaggcatttttcaatgagataaacatagttaataattgactgcagtagttatcaaatactctgctagattttgcagagcgttataataaatgttctcatgccccactatcactcttgcaagcaagagagagagagagagagagaaagagagagagagagagagagagagagagagagagagagagagagaatgagaatgtatctttctccattcctttaagtctttgctgacatagggattctttgacccacagaacaggacagaaatgatgctatgaaggtctagaagctaggtcttaaaatgcctctttttaccttgttgatccctggggtcattttttagagaacctgagtcttttcttctaaaacattgggtttgtcaaagcttcctaaggaacattccaagtaggagtgaggctgtctcagaacctccagcctcaggcgagccttcaggtgacaggtatctgaatgatcccaagcaattccagcgcaatagcctatgcagctgatttccaggatgataaattactatcattttaagccactaagtattagagtactgattgataatctgatttggtctcatattaaaatacataaatggaaaattatcacccatgatctttctgtgcaggcataattattattattaaagttgactttcttccagaattttaatattcaaatcaagacatatgcaaagaggctttgttcttgttgacatgctattggaattctgctgtacgtgctatctgaaaacctgtatttttcttgtaataatatactcatcactttcatgtctcataaataatctttcacatcattttaatgactacataatactccatcattgtagtatatataatttacttaaccagtgcctgtgactgggtcattttgactattatacttaacactgtaatgccataaatctttgtacagataaatgataatcttttgtaatacattatgggtatagctgcttaagggttttgttttagtataaagtaaacaaaacatcttaattttacttcattttatccatgagtttaatgagagtcttacatgtctgttggctatttgtttatctagtgttttattaagaaatggcccttgtgtatgtttattcaatttttaaacaatttgttatgtaacacacacacacacacacacacacacactatggaaggatatcacagaacattagataaaagtgggtcactctcaattcttttctagctactgggcactaagtatattacctacatttttcaagccttatttctcttatgtggggagcgagtatctatttccttacattgtgattttggtgatttaagaagtgttcaacaatataagttatagagactaagtgtctaataaatactgtttttatacgtgtttgccttacaaaaaccaggccatactatattgcattttttgaaaggatttatgtaatttatgtatatgtgtcagtgtgcagatatgtgcatattagcccatggaggccaagagtatatgggatgggatttgttttaccctttggaagcagttccctgcctggtaatgagaggctcttagaagatgaggggatgctgtcctattccaatgtggtgtgagggaggttgtggtacctgtctcatgaggagggcagcctgcttaagagagcacaaggaaatctaggtccataataatgtatctatgtatatggggtactcaagacatggtggttgcatgagtagaggccaaaggacattagaaagttcctggacttggtggcaggtatctttaccaaccgagctactttgtcaacctcatttttaaaacattagcatgaattgttgcatggtgacttatgcttgtaataagagcacttgaggaagactgtgacaagaggtgtgacaagaatttgaagataaaatgggctatatagtgagttccaggctggtctgaggtacagaatgagaccctgtctcaaaactcagattatttataatgaaaagtccttattaaattgggtgatgatggggctatagaaaataaagtgaggcggaagcacagagccgctgaggcagcaccctttgcaggccgcagacagccggccactgtccggaccagaggacaggtgtctgtctggctcgggaggtggcctcagcctcagcagcagcagtagccatcttggttccgggactccgcggaacttaggaaattagtctgaacaggtgagagggtgcgccacagaagctgacagcttctgggaactgccaaagcaacacagcttctgagaaaggtcctgttttgggccttcttcttcggccaggaggaggtccaaacacaagatatctgcgcaccttccctgtaagagagcttgccagcagagagtgctctgagcactgaaactcagaggagagaatctgtctcccaggtctgctgagagacggtaacagaatcaccagaagaacaatctctaaacagagtcaactataactactaactccagagattaccagatggcgaaaggtaaacgtaggaatcttactaacaggaaccaagaccactcaccatcatcagaacccagcactcccacttcgcccagtccagggcaccccaacatacccgaaaacctagacctagatttaaaagcatatctcatgatgatggtagaggacatcaagaaagactttaataaatcacttaaagaaatacaggagaacactgctaaagagttacaagtccttaaagaaaaacaggaaaacacaatcacagaaaaagaggaaaaaacatacaaacaggtgatggaaatgaacaaaaccatactagacctaaaaagggaagtagacacaataaagaaaactcaaactgaggcaacactggagatagaaaccctaggaaagaaatctggaaccatagatttgagcatcagcaacagaatacaagagatggaagagagaatctcaggtacagaagattccatagagaacatcggcacaacaatcaaagaaaatggaaaatgcaaaaagatcctaactcaaaatatccaggaagttcaggacacaatgagaagaccaaacctacgcaaaataggagtggatgagaatgaagattttcaactcaaaggaccagcaaacatcttcaacaaaattattgaagaaaacttcaataaagaaagagatgcctatgaacatacaagaagcctacagaactccaaatagactagaccagaaaagaaattcctcccgacacatgataatcagaacaacacatgcactaaataaagatagaatagtaaaagcagtaagggaaaaaggtcaagtaacatataaaggcaaggcctatcagaattacaccagatttttcaccagagactatgaaagccagaagagcctggacagatgttatacagacactaagagaacacaaatgccagcccaggctactatacccggccaaactctcaattaccatagatggagaaaccaaagtattccacgacaaaaccaaattcacacaatatctttccacgaatccagcccttcaaaggataataacagaaaagaagcaatacaaggacggaaatcacgccctagaacaaccaagaaagtaatcattcaacaaaccaaaaagaagacagccacaagagcagaatgccaactctaacaacaaaaataacaggaagcaacaattacttttccttaatatctctgaatatcaatggactcaattccccaataaaaagacatagactaacagactggctacacaaacaggacccaacattctgctgcttacaggaaacccatctcagggaaaaagacagacactacctcagagtgaaaggctggaaaacaattttccaagcaaatggactgaagaaacaagctggagtagccattttaatatcggataaaatcgacttccaacccaaagttatcaaaaaagacaaggagggacacttcatactcatcaaaggtaaaatcctccaagaggaactctcaattctgaatatctacgcaccaaatgcaagggcagccacattcattagagacactttagtaaagctcaaagcatacattgcannnnnnnnnnnnnnnnnnnnacattccaaagtgagcagggactgttttcttcactgtctgtaatgaccatctggattcaattgttaatgttcaatcctatttgttgctaaggcaacccagttataggctatcctcactttaccaaaggtgatattgccagagtcatcttataagtcagatttggaaagacacaatatattttcctaggtgaaaagtgatgttaatggtgactagaacctagagaattgcatttaactcatattgttgcaatacttgtgcaaaatgagtcagtaaatatatcccatgctgcccagctcacagcaatattttggaacaatctggtcatgagaggaaaatcagcctctttccaatattctccaaaactggtttgagcctcaggatatcctgtgtttagactgtaattttcccaaagttgtttgaatgcctggcttatcctggaagagtttattaggatccatcattctagtcatatgcacatcaaaataaggatcttttgtgggctccagaaatatgtggacttaaaaagaccccaccctggtgattccagcattctttgtgtattattacctaaacctcttcaatagctctcccgttgacccctccccacttcctcagcactggggatgccttcctacaaaactgtcaagttcaaagtcacagttctataggaagttaccttatagggtaccataattccaactgatacagttctgatcatggtatacttggaagatgttgaggagtagacttgatttgctgatgctcacaggaacaggctcttccatctctactaagggagaaggctgacaacccaaacacagagatcaacgctgccatggttacaagctccattatcaacatcatgggattcgtttaaaaaataactaaaatagccctgtttcttgttcttattacatttggacagaggcatgtgtctcaaaggcaatctacatataagacactccatcctattggtgggatgcctccccagatactaggaaagtccgtactatatcactgctctgaccatcttgatttttataataaactacaatgatagagtaatgaaccactgtgcatgactacgtcctagtgaagccatatcatcagaccccagaaaactcagacaaatcttaaagaggaacctaatttaggttcaaaacaggatcctgagaaggcagttttcaatgagataaacatagttaataattgactgcagtagttatcaagtactctnnnnnnnnnnnnnnnnnnnnttagaaggagcaatttgcaaattcatctggaataacaaaaaacctaggattgcaaaaactcttctcaaggataaaagaacctctggtggaatcaccatgcctgacctaaagctttactacagagcaattgtgataaaaactgcatggtactggtatagagacagacaagtagaccaatggaatagaattgaagacccaggaatgaacccacacgcctatggtcacttgatcttcgacaagggagcaaaaaccatccagtggaagaaagacagcattttcaacaattggtgctggcacaactggttgttatcatgtagaagaatgcgaatcgatccatatttatctccttgtactaaggtcaaatctaagtggatcaaggaacttcacataaaaccagagacactgaaacttatagaggagaaagtggggaaaagccttgaagatatgggcacaggggaaaaattcctgaacagaacagcaatggcttgtgctgtaagatcgagaattgagccctttcgctcgactcgagactcgaaccccgagccccgggctaccttgtcagcagagtcttgcccaacacccgcaagggcccacacgggactccccacgggaccctaagacctctggtgagtggaacacagcgcctgccccaatccaatcgcgcggaacttgagactgcggtacatagggaagcaggctacccgggcctgatctggggcacaagtcccttccgctcgactcgagactcgagccccgggctaccttgccagcagagtcttgcccaacacccgcaagggcccacacgggactccccacgggatcctaagacctctggtgagtggaacacagcgcctgccccaatccaatcgcgcggaacttgagactgcggtacatagggaagcaggctacccgggcttgatctggggcacaaaccccttccgctccactcgagccccgggctaccttgccagctgagtcgcctgacacccgcaagggcccacacaggattccacacgtgatcctaagacctctagtgagtggaacacaacttctgccaggagtctggttcgaacaccagatatctgggtacctgccttgcaagaagagagcttgcctgcagagaatactctgcccactgaaactaaggagagtgctaccctccaggtctgctcatagaggctaacagagtcacctgaagaacaagctcttaacagtgacaactaaaacagctagcttcagagattaccagatggcgaaaggcaaacgtaagaatcctactaacagaaatcaagaccactcaccatcataagaacgcagcactcccaccccacctagtcctgggcaccccaacacaaccgaaaatctagacccagatttaaaaacatttctcatgatgatgatagaggacatcaagaaggactttcataagtcacttaaagaattacaggagagcactgctaaagagttacaggcccttaaagaaaagcaggaaaacacagccaaacaggtagaaatcattaaannnnnnnnnnnnnnnnnnnnnnnnnnnnnnnnnnnnnnnnnnnnnnnnnnnnnnnnnnnnnnnnnnnnnnnnnnnnnnnnnnnnnnnnnnnnnnnnnnnnnnnnnnnnnnnnnnnnnnnnnnnnnnnnnnnnnnnnnnnnnnnnnnnnnnnnnnnnnnnnnnnnnnnnnnnnnnnnnnnnnnnnnnnnnnnnnnnnnnnnnnnnnnnnnnnnnnnnnnnnnnnnnnnnnnnnnnnnnnnnnnnnnnnnnnnnnnnnnnnnnnnnnnnnnnnnnnnnnnnnnnnnnnnnnnnnnnnnnnnnnnnnnnnnnnnnnnnnnnnnnnnnnnnnnnnnnnnnnnnnnnnnnnnnnnnnnnnnnnnnnnnnnnnnnnnnnnnnnnnnnnnnnnnnnnnnnnnnnnnnnnnnnnnnnnnnnnnnnnnnnnnnnnnnnnnnnnnnnnnnnnnnnnnnnnnnnnnnnnnnnnnnnnnnnnnnnnnnnnnnnnnnnnnnnnnnnnnnnnnnnnnnnnnnnnnnnnnnnnnnnnnnnnnnnnnnnnnnnnnnnnnnnnnnnnnnnnnnnnnnnnnnnnnnnnnnnnnnnnnnnnnnnnnnnnnnnnnnnnnnnnnnnnnnnnnnnnnnnnnnnnnnnnnnnnnnnnnnnnnnnnnnnnnnnnnnnnnnnnnnnnnnnnnnnnnnnnnnnnnnnnnnnnnnnnnnnnnnnnnnnnnnnnnnnnnnnnnnnnnnnnnnnnnnnnnnnnnnnnnnnnnnnnnnnnnnnnnnnnnnnnnnnnnnnnnnnnnnnnnnnnnnnnnnnnnnnnnnnnnnnnnnnnnnnnnnnnnnnnnnnnnnnnnnnnnnnnnnnnnnnnnnnnnnnnnnnnnnnnnnnnnnnnnnnnnnnnnnnnnnnnnnnnnnnnnnnnnnnnnnnnnnnnnnnnnnnnnnnnnnnnnnnnnnnnnnnnnnnnnnnnnnnnnnnnnnnnnnnnnnnnnnnnnnnnnnnnnnnnnnnnnnnnnnnnnnnnnnnnnnnnnnnnnnnnnnnnnnnnnnnnnnnnnnnnnnnnnnnnnnnnnnnnnnnnnnnnnnnnnnnnnnnnnnnnnnnnnnnnnnnnnnnnnnnnnnnnnnnnnnnnnnnnnnnnnnnnnnnnnnnnnnnnnnnnnnnnnnnnnnnnnnnnnnnnnnnnnnnnnnnnnnnnnnnnnnnnnnnnnnnnnnnnnnnnnnnnnnnnnnnnnnnnnnnnnnnnnnnnnnnnnnnnnnnnnnnnnnnnnnnnnnnnnnnnnnnnnnnnnnnnnnnnnnnnnnnnnnnnnnnnnnnnnnnnnnnnnnnnnnnnnnnnnnnnnnnnnnnnnnnnnnnnnnnnnnnnnnnnnnnnnnnnnnnnnnnnnnnnnnnnnnnnnnnnnnnnnnnnnnnnnnnnnnnnnnnnnnnnnnnnnnnnnnnnnnnnnnnnnnnnnnnnnnnnnnnnnnnnnnnnnnnnnnnnnnnnnnnnnnnnnnnnnnnnnnnnnnnnnnnnnnnnnnnnnnnnnnnnnnnnnnnnnnnnnnnnnnnnnnnnnnnnnnnnnnnnnnnnnnnnnnnnnnnnnnnnnnnnnnnnnnnnnnnnnnnnnnnnnnnnnnnnnnnnnnnnnnnnnnnnnnnnnnnnnnnnnnnnnnnnnnnnnnnnnnnnnnnnnnnnnnnnnnnnnnnnnnnnnnnnnnnnnnnnnnnnnnnnnnnnnnnnnnnnnnnnnnnnnnnnnnnnnnnnnnnnnnnnnnnnnnnnnnnnnnnnnnnnnnnnnnnnnnnnnnnnnnnnnnnnnnnnnnnnnnnnnnnnnnnnnnnnnnnnnnnnnnnnnnnnnnnnnnnnnnnnnnnnnnnnnnnnnnnnnnnnnnnnnnnnnnnnnnnnnnnnnnnnnnnnnnnnnnnnnnnnnnnnnnnnnnnnnnnnnnnnnnnnnnnnnnnnnnnnnnnnnnnnnnnnnnnnnnnnnnnnnnnnnnnnnnnnnnnnnnnnnnnnnnnnnnnnnnnnnnnnnnnnnnnnnnnnnnnnnnnnnnnnnnnnnnnnnnnnnnnnnnnnnnnnnnnnnnnnnnnnnnnnnnnnnnnnnnnnnnnnnnnnnnnnnnnnnnnnnnnnnnnnnnnnnnnnnnnnnnnnnnnnnnnnnnnnnnnnnnnnnnnnnnnnnnnnnnnnnnnnnnnnnnnnnnnnnnnnnnnnnnnnnnnnnnnnnnnnnnnnnnnnnnnnnnnnnnnnnnnnnnnnnnnnnnnnnnnnnnnnnnnnnnnnnnnnnnnnnnnnnnnnnnnnnnnnnnnnnnnnnnnnnnnnnnnnnnnnnnnnnnnnnnnnnnnnnnnnnnnnnnnnnnnnnnnnnnnnnnnnnnnnnnnnnnnnnnnnnnnnnnnnnnnnnnnnnnnnnnnnnnnnnnnnnnnnnnnnnnnnnnnnnnnnnnnnnnnnnnnnnnnnnnnnnnnnnnnnnnnnnnnnnnnnnnnnnnnnnnnnnnnnnnnnnnnnnnnnnnnnnnnnnnnnnnnnnnnnnnnnnnnnnnnnnnnnnnnnnnnnnnnnnnnnnnnnnnnnnnnnnnnnnnnnnnnnnnnnnnnnnnnnnnnnnnnnnnnnnnnnnnnnnnnnnnnnnnnnnnnnnnnnnnnnnnnnnnnnnnnnnnnnnnnnnnnnnnnnnnnnnnnnnnnnnnnnnnnnnnnnnnnnnnnnnnnnnnnnnnnnnnnnnnnnnnnnnnnnnnnnnnnnnnnnnnnnnnnnnnnnnnnnnnnnnnnnnnnnnnnnnnnnnnnnnnnnnnnnnnnnnnnnnnnnnnnnnnnnnnnnnnnnnnnnnnnnnnnnnnnnnnnnnnnnnnnnnnnnnnnnnnnnnnnnnnnnnnnnnnnnnnnnnnnnnnnnnnnnnnnnnnnnnnnnnnnnnnnnnnnnnnnnnnnnnnnnnnnnnnnnnnnnnnnnnnnnnnnnnnnnnnnnnnnnnnnnnnnnnnnnnnnnnnnnnnnnnnnnnnnnnnnnnnnnnnnnnnnnnnnnnnnnnnnnnnnnnnnnnnnnnnnnnnnnnnnnnnnnnnnnnnnnnnnnnnnnnnnnnnnnnnnnnnnnnnnnnnnnnnnnnnnnnnnnnnnnnnnnnnnnnnnnnnnnnnnnnnnnnnnnnnnnnnnnnnnnnnnnnnnnnnnnnnnnnnnnnnnnnnnnnnnnnnnnnnnnnnnnnnnnnnnnnnnnnnnnnnnnnnnnnnnnnnnnnnnnnnnnnnnnnnnnnnnnnnnnnnnnnnnnnnnnnnnnnnnnnnnnnnnnnnnnnnnnnnnnnnnnnnnnnnnnnnnnnnnnnnnnnnnnnnnnnnnnnnnnnnnnnnnnnnnnnnnnnnnnnnnnnnnnnnnnnnnnnnnnnnnnnnnnnnnnnnnnnnnnnnnnnnnnnnnnnnnnnnnnnnnnnnnnnnnnnnnnnnnnnnnnnnnnnnnnnnnnnnnnnnnnnnnnnnnnnnnnnnnnnnnnnnnnnnnnnnnnnnnnnnnnnnnnnnnnnnnnnnnnnnnnnnnnnnnnnnnnnnnnnnnnnnnnnnnnnnnnnnnnnnnnnnnnnnnnnnnnnnnnnnnnnnnnnnnnnnnnnnnnnnnnnnnnnnnnnnnnnnnnnnnnnnnnnnnnnnnnnnnnnnnnnnnnnnnnnnnnnnnnnnnnnnnnnnnnnnnnnnnnnnnnnnnnnnnnnnnnnnnnnnnnnnnnnnnnnnnnnnnnnnnnnnnnnnnnnnnnnnnnnnnnnnnnnnnnnnnnnnnnnnnnnnnnnnnnnnnnnnnnnnnnnnnnnnnnnnnnnnnnnnnnnnnnnnnnnnnnnnnnnnnnnnnnnnnnnnnnnnnnnnnnnnnnnnnnnnnnnnnnnnnnnnnnnnnnnnnnnnnnnnnnnnnnnnnnnnnnnnnnnnnnnnnnnnnnnnnnnnnnnnnnnnnnnnnnnnnnnnnnnnnnnnnnnnnnnnnnnnnnnnnnnnnnnnnnnnnnnnnnnnnnnnnnnnnnnnnnnnnnnnnnnnnnnnnnnnnnnnnnnnnnnnnnnnnnnnnnnnnnnnnnnnnnnnnnnnnnnnnnnnnnnnnnnnnnnnnnnnnnnnnnnnnnnnnnnnnnnnnnnnnnnnnnnnnnnnnnnnnnnnnnnnnnnnnnnnnnnnnnnnnnnnnnnnnnnnnnnnnnnnnnnnnnnnnnnnnnnnnnnnnnnnnnnnnnnnnnnnnnnnnnnnnnnnnnnnnnnnnnnnnnnnnnnnnnnnnnnnnnnnnnnnnnnnnnnnnnnnnnnnnnnnnnnnnnnnnnnnnnnnnnnnnnnnnnnnnnnnnnnnnnnnnnnnnnnnnnnnnnnnnnnnnnnnnnnnnnnnnnnnnnnnnnnnnnnnnnnnnnnnnnnnnnnnnnnnnnnnnnnnnnnnnnnnnnnnnnnnnnnnnnnnnnnnnnnnnnnnnnnnnnnnnnnnnnnnnnnnnnnnnnnnnnnnnnnnnnnnnnnnnnnntgagagatagagtatagaaaatttcagtggtcaaatccctcccttaaaaaggaaggaaaaaaatcacttataaaagagtcatggtttctaacatgttaaataatttttaagcatgtgcatgtaaatacgtgtggcattttagattgtaaactgtttgagatttgcctgtaaatgtgaacgctgagttactactgttctagactgagtgtgaagtgtgggaaaaatgttgagctgataacgtcaggcagactggagctaagaagcagctgggctgaggcagctcagaggtcttgggctgtgtgtgtacatttctgtgattctatagatgtggaccctctggatgatggctttctcccattgttactgtttcattcccacagactggtagacactcagacatggatgctatgcccttaactatgtgttataactaagagatatggcagaggagctttctattagaagagtctaccaatcacttggtcagcccttgaagtgagagagtgattaaggggagggagaacattctacaagagaaagtgatgggaacttgaaggaagagaaagctattaccctatccagtacctagctccttggcacacacaatcatgtggtgtagaatttcctgtactcatccaacctacttggcccccagtcctacaaccatcaaagtggtgcacttcctggaggaaagaaacaccttttagtgatactaaagaatggacccagagaagaatctggaagtctttcgaaagcttcacgtcacagataattaccacatgctatgcccttgtctaatcagaccgccgcacaagtgtccattcttcatcaaatctaagcagaaatgacactggtgtctatgtctttgtaccttcatttctaaggactctttgtcacgcaaaacttttcttcaataattgtctgtgcctttctcttactggcctgtcttttgttagtgattccttagccatgaacctagcacatgtagcaaagaattcttttttttctggatgaagatggtaaagtcttagtctactcggctacctatgcctgtctccatcacgttctatctacatgccacccccttgagtctgtcactgtttctcatctatggaggataccccctcctaggtcgcaggttccattcaggcttttcccatttatattgtgatgcccaaatctctggggataggaacagaatcatgcaattatgatctcacaataatcttttctagaaacccaacagtgtaccgtttacatctgtggcttctcactttattctgtgtcaggtaaagtgaagttctggccactggcaaatggtagtaatttttttttaagagaaggtaaatatgtggtttggggtaagaaaaatgaagtcgatttctttgaaaacccatcagaagaaagattagtaaactccagtagaagaaaatgtcaacttccatttctttattaaaacctatcattttccttctttctcctttttcttgatatatgctaacagtcctcttacctttcaggtccatagtgattcacagttagcacagaacaaaggaacaaaggcattccattcaaggtctaagcaaaagtagagaaagaaaggtttgtctgtgaactgagtttcagaaccattgcctccattagaattagccgaaatagaagcaggagagcagaaatgcagagcctactgggagcaaattaaccctggaagtgaaaaggggacatctggtagagagtctgatagaatagcaggaaagctgtcaggaaggaggagggggacatggagcagattatgctacactttatttactgaagtgaccctctcactgtacttggaatcccatagcttctggctggtctaactgtccatcttgcccaggaatctcctgtcttcataggtgctaggattccaggcagctattacatctgcctggctttttacactggcttgtggagattccaactctgttcctcacgcttgcatggatcaatgctctacccactgatcccctacccccattttaatggaaaagaaatgcaatggcatttagctctgacagaacacttagctctgtcttcagttgtgtggctcacttgcttgatgggaaacagggcaatatcacctaagatttcttttactttgcagaatgtaacaaaaagtctctccctctggcatggtttgacaatacctccaaactgcctctctttcttcaggctcttcaaagaaccctcagggaacatgctcacttcgagaagttccaagaaagaccttttgtatatggtccctccaagatactatgctagagcctctattgattttgcctgttctcaaccctccaaggacagcaacaggaacatttcttgggttgtacttcctgagagactaaaaaggtgatgttggagcagcgtgtgtctttgcccccgcaaatctgaaccctcttccagccttcaagctttgatatcatattgaaatctctgaatttttttttcttgcttccatttgattataagaggctactcctatgagaggcactggtgtggactctaagaatttacaaagaagagaataattgttcttaatcattggcatccacgggtgcttcctttcctcccttaccccccagagaactgcaaatccctcttccttcatccataatctccccagtacaatgatttagttgtgtgtgcctagttgtggctcttaaagggaatgattctcattcttagaagcaatgattatgtgaagagaggtgagcgggatagtcggcctctgcgagtggcaataatggaagtcagaaagctattcgctgggtgagttcattttatattgctaaagtacaatatcacatagttagcagagtgtgattaatagcaatgttttggcttacttttgggaagctaagaaatccaatattgagaggttagcatctagtaggagcttttgggctatgccatctcatgacagaccagcagagaaggttagagagtaaagaccaaactcccattctttagacctttaaaaaaattctttgtcattatatttaaggggcactcccataactccaactccttcttatgggccttaactcccaacagaggtgcagtatatattatttctaaacctaacacagactttttaaaggacatatttaagttcatagcaatgaataaccacacaaatagatcattacaaaatgtaatggtaggtgttttggatacagagttgatcttgtacaaagaccatcaatggtagacatctcttttattttacaatcaaggaagggctgtctccaccttggcactattaacatttggactggatacttttttggagtgaggttacttaatctacatcccatgtcaattattagcagcatccctgaattccacctactagatgcccccctccaattgtaacagacaaaatgtctccaaattttccacatgttccctgtggacaaagtctcccccagtaaagaactatatgccttatacaagttcccaaataagcagcgttgcagtatctcaaaaagaagggagggggtggtaagagttttgacagttatttccaaaaattaaacttttttttaaaaacccagcaatatcaaaaatcacccaaaatataattttatgttaaatgcttacctgcatgccatgccaatgtccctttaagcagacattcatcctctggagcccgtctgcttgtcctgaataaggtgtctaactagagttgccaaagaaaaggcagatgtagcctgaagctgtcttccaaaacgtattttaacttattgaatctctgggctggttaaagttgtttggccttcagcctgctggtttatatcactgccccaagcagggtattatcatccagaaatacatgacctcacttttattggaaagatatttataggtactgtgtagactctccatgaataagtttaatgtgtttagagtgtataaccaggctgggtatagtatcaaataattttcactaacagttgccttatatcaaattttgaacatacaagaattatcatgtataaaaaataaatacaatcttaagaaaaaattagagatttagtatggaaaaccaatgactgctaagtcaaatgtggcatcaggtctctgatcttggacatatcaaccaacatcaattttctcatttgtaatgaacatgataatttttcccttaaaggagtgttaggaagatatattaggtaatagcaatggcagatatcctgtaaaagtataaacatgacaatgtgtccccctttcacataaattgtccagtttaactcctcccagcctcatccagatgggatctgccagaaatgcaagagagagcctggccaagaagcaatcttcatccttcacatccaggggagcttcagagcccctcaatttaacctccctattttagttagactcctataatttcttattggactcttatagtaattttccaattaggtaattatgaccagagacatgattcttactgtcattctctaactaaactctgttattactcccaaagtctcacagcataccgacattccagctccaagggaagagtccatttctcattgctcttgtgttgttccactttgccctgggttctagccgtgcctatgctctgcaggagtaccactctccacctctgtccctgctgggccacagagatgtgttttcatcgttttcatcggtgtgtgtccctcccaggccctgtcaatcatcgttcaagtctctgcatcttttacttttgccaatttggatgctttatataaatgcaatcatgtatgtgtcattgagtggccggattatttcacctaccatgtgtcaacatgcatatgtgtataaaataacagatttctgccttacatgtgtggtataaagtagacttttgtttgctggttttaggaatgaagatagctatttgttttacttatgttatgataagatatttatatttaatataaagatctacctctttaacatggtttttaagtacacaaaacaacattatcaactgtaggcataatgttttaaagactctagaatatattctcctatagcactgtcattatatagcatactagttgaaaattggctttttatttttccttcttcctctcagtccatcaccatcatcattttgttctccatatattttgctattactactttagatgcctcatatacattgaatcactcatgtgcccttctatggccggattatttcacctactgtaatggcctctgagttcatgtatgctgtcatgaatggcagggtgttctcattttaacgatgaataatatagattaaggatttaaatgtaataaagtagactaagcattaataccacctgaagctatcaaatatggaggaaatgagtcaagacactggttgaggcagggatttcttggatgtgacaaaaacaaacaaacaaacaaaagcaaagacagagacaagctcctccaaaaagatccccacaaattacaaaagtgatggctagaagaattggctacagccacctaaaaagctttttcacaacacaggaaccggtcatcagaatgaagagagagcactagcacaagggatgaaaaagaagtatttataccatagatctgataaagtgttcgtatccaaagtttagaagggacttatgaaactcagaaagagaactgcgatgcaagtgagcaaagactttgaatagatgtttctgcaaagaaacagatgaatgacccagaggtacagggaatgacggggcatcactgattgttgtggaaatgcacatcaaaactaaatctgataagaaggaaactattcaaataaataagcaacccccaaaggcaacccctttgggaagaatgtgggggagctgaaactctgtattccgctaaaggaaacctaaaatgctgtagaaatgaggacaatggtgagcttaccaaggaagtagacatttgatctggtaacaccacttctacagatctatttttataaaattaatatcagtctgttaaggaaattgaattcattctcatcttaattgtagtgttatccatagtactagtcaagctaaggagggacccaatgcccatcaaagagttaatggataatgataatgcaaatatccaccatactgttttagcagcttcctgtcttagaagcaatgtctcaccttgtctacccttgagcatcctccagattcatctcgaaggatgggccacatgcctgagcaccatctgacctcctgtatgcctccctccctcttctcattacccctttgtcctgacaactttgtacatatttctgttagtttgtgtgacatgtcattggtataaatatttgtttatggctctatctgctccacagggatgtgaatggctaggaaagaggaagtacagcttattaatcttgtctttccagctattaccactgaccctgcgccagcccatgttccataagtatgtgatgaatgagtccatgtttagtttgaattcccatagtgatgaagcgtgcagcagtggaaagtaaccacctgattttcactgtgtcaaattcaaatggataaatctttatctctattgtcctatctacgtccttatgcattcgatccaaattcctaatcaaatgcctagcctcttgatgactacaacgtaacacacattatataataaaaatggcccctcttaaaactctccctagagctaattccatgatgcttagtgtgttctgacaatacgattagctgagctcttattctaaatccaacattgtagtaagaagaggacattatacctgccgtgctcacatttattcctgtatcttcctgttatagcaatattagttggaacactgtaggggcagaatcatatggatgcgatggaagtgttcctggtaaatctccctggactccaatctattagcaatgaccagttcagcccaagtccatcaaaacttcaattttatcaaagccccctctatagatgccactttatgtgctattaaacagaacaatgcagctcaccagtaaaatcatctacaataacagcccattaaaagctttccttaatatggaactttctaattaatgtaaatggagtgggaagcttggtaagacaagttgattctaatgttcggaacgtaggtaaaataggaaagggtctgatttttcattagcaatgtattagagagcctaatgaaatctttatggcttggatatattacccaaaagtcacaattgctttgtttcctgcctcatttcgctgccacctttctctaaaaattttgctctgttatgcattagatttgagaaaatggaattttcttccacacaaagaagcatggattttatgtccgaatactcccggggttctcagaatattggagacaaaaggaggcagtggaagatgatccttagtttccaaatgtccaaattagaagcacataccaaagagggtagaaaactaattctgtcatttacttctttcccccgtctcttcctctaataccgtcttccacacttcttttttcattctatcccttctttcctttcttcttcctctctctcccaccccttcctgtttcatgttctctgtgcaatgtgtaaggtttgtatcattcagcttaggctagttagcactgataacttgccaagcctagaatgatctggggaaaaaggaaaagttgctcattcactgagctgttgtttttaccaagttgttctgtggctatatctgtgagggattgtcttcagtgatataggaagaccacctcctttctacatcattataggctgtgtagtttctttggcctgtgctgtataagaaagctagctaggcatgaggctgtaagccaatgagtaagccagcaaagaccatgcctccacagtttctgccctccaggtttacaccttgagctcctgccctgacttccctcaatggtggatttgtgacctcgaggtatataattcaagtcagccctccttctctcaggatgcttttggccagagaacagtagaacagctagtttacactgtaatgatgaccaaacaccaaatcttaaatgtttaagtatccaaagctcatctttgttcatactatgaagccaggcagcaacttcatacataaactcctttcctataataaggcagtaacaaccagagccagtcaaagactcaagctgattgaactgccattgtgatgagcattgtcactttgtatggcagagtgaaaagagaatatgacaagtcagcctgtagtcctttaagggttgtcatggatgtcacaggtcacttctgctcacatttctttgccaaaagcaagtcagcttgctgtgcctgacttcaaagaagttatattagttcatcctacgatgaatctaaaaggtcccctgagaggcagctaatgtaatagtctatgattccaaaatgaattaggaacatatcctgctgctggagagctccgggtcctgttgaagaaccagaaaaaatccgagacaggactagataaagcctggaaaaaattgaccaagagccctaagaataagcgggcccttccccttccctgtgctgaccttcttccgggctttacatcattggatgacatcctgcctttctcactggggtacagtgtccagtagggaaactcacagtactctgcccacaagtactgacaactctgcatgtccatagagttaggaggagaactttaggcatccagtgcagacatacctcctttcaaggaggcaatgcacaagggaggagagagtgcacagctaatcctgatctttacccggcgtgccaaatggcatctgttgcatctgaatatcaggaagtaatccttggttggagacagctctatcctgtagaagagcagggtgatttaggacagtgagaggcttgggatgttggactgtgaggtagggagactgaagcaggaatatggcttcatatccaggcccatatgaaagttcagggttttttcttaagcttctgaaaaagcccagaacccatacaaaagttgagcccagagtcttagtgcatcactgaccatgcacaatgaccttgtggccttgagagagttggtgctggaacccaggggaccagagagggacaggaatcctatgctttggtgataggtacacattatacactctatattcctctgtaattgaccttttttaaagcctagagaaaatgttctgcctggctttacaatcacattccaatcagctttacagaattgtgaaattgattatccagtgggtctcacaggggttttgagtaggacagaggggtaccttaattctttgctgagctccacatgctgattcctggagactttggctttcccatctatcaccaagaggaaaggagttcaaattgccttgaaattacaatttagtggcttcaagctttggccagtctcacagctagggctgagggcaaggaatgaagtaccaggcacattagttcctgttaagccgcatagaaaagagatggtgttgttgggggtggaggaggtacccatggaagttcggataacagtgagaattttgagaggaagatgtgaacctctgggaagtaaggcagcagttgccttaatctgggctgagtggttctgagtttcagcaaaggacaacgaccagggcatcatattcagctgagctgtgccacgtgactcacactagttatttcttcattttaattctctgttatgaggaaatggttgggatttgcatattgttagagtgaaatgaatagaacatcattttctatttcactctactcaaggcaagaaggtctgtcacgaagaaggccaacctgagacaagaaataactaaggaaaatttgagggctctgtaacagacatgtcaactgcatatgcccaaatatagaagcatgtctccagggcaaaagtgggtaaagagaaggtagaacatgaaactggtgtgacctaacatgctaaggacacatgaatgtgaaagcagaggcaggtcatgcaccctacaaagaaaatgtggcgttctaaacacaaacatggagctgtggagacacagaaggaccaagcacggaccagtcacactcaagactggctagaccaagtttattcagtgtcacatatctatccacttgggtggaattcacaatgaatattctataggtggcatgcatagtgatgatgggactctcataatctaaacatgtacgtatattaatggaatggtctgtatagactacttactgtgtgaaagaactgttttaagtgcttttcactaattatcttgacctttatatatattgtatggtacattcctcactatctggatcctaaagataaagaaatgaagcctaagggtgttgtaaaaggccagagagatggtaaatggtggggttgagatttcaaattcagccagtctgaacctcgagggtactcctcagctagcacagcggagcttccagtcattttagccaggtcacctttgtcaggtcagcaaatggtcagtgaacctacagatatacagttatgacccagacattgtgccaagtgttgggcacggaggttgatcacgatggtaagtcagatcctcacgtggatcgggcagaaagcctgtgaatagctagcacaagactgagcctctaactacagaacaagaacagaaacggagaatcggaagagaaatgaccatgacatgaaaggatcttcactgcactacatctcagatgctggcttttacagatgaaaactgccaaagccaaggagtacgtgatctgctaagggtcatagtaagttagcatctgagccaagacaggagtcaaagaatgctaacatcacatcagctatagatacttacatagtcctcctctgtgcctcccactgtcctagagagcatgagtgtcacgtggtatgagagcctccatgatctcacctctctccatgcaccgagtgctgcccaggttctgaagacttgcaatacacatagattccatccatttctggttctactatatgatgcccttcatgcttctttcttccatgtccagcctatgaatggaagctctgaacaagcacatttcatttcttgctcgactcaaattctcctgtatgagcagaatgctgggagaaagtgcaatagaggacccatgcttttctcctacttcccaaagcaggaaaatcttagcctttataaaccataagaagatcctcttgaggccataaatacagagtggagcactcctttactcaaagagtacatttgtgtgtgcttgtctgtatgtgtgccacagtcatatggtgctgagagtgcagaagagggcatcagatccccctggagctggagttataagaagttgtgatctaccatgtgggtgctgagaactgaaccccattcctctatgagagcaagttctcttaatcacagagatatctctccaccttcggattactcatttttaataggagatcagagaaaggggaaacctcagagaagcaaagagttgtgaccaattcttcaaaaatctcttctagcgtgcatgattttctttttcttcccttcttctcatcccaggagcaacattatctggctgagatctcagctttctgtatgccccaatagggtctcactaccccaggactcccacagcaatgtctttagaggcagaaaataagggaatctgttaggtagtattcctggtatcatggtccattggggctgttgtagacctgataaagtagaatcgactgtcagttaaagagtaatgcataggggtctccaacagcttggccctttctcttccctgatgacctccccttactatgtactacctacaggatttatgatctccatactactcgctatgcctatgctacaatggagcccatagtgctataactgtgaccaataaacattactgtaacctctacttcatgatggcatcctcctcctctgcatgcactcctccaaagccctcaagttttcgtgtcttagctatgtccacttatagatgacagactaaggcatgtctccttatcaggctgacgaatggcatagatccaggtcactcactctaaccccagtgctacttgcaaattgatacaaagagctcagagtctacagcagtcacatctggctatttcaggattgagccactaaggagtagtagcagaatcacctgaggatgagtgagaatttcacgatgccagtcccagccactagacctactcagagtctgattcggttgcacatgagagcttacagatggttttagaatatgttcttgaacctaccttaacacacaatccttggatccctgaatgaagaggacacaggtgatcatgttcccaattaggtcaaggcaagtagctctaaaccccgaataagaacaacatgctcactaccctttaagagcaagaaagagaagggtattgtagagccaagcagagggtattagatgaaccaggctatgtagctttcattcatataaaagagcagtgtctgctagtattctaacaagtatggttggagaagcacatacatgtatgcatgcatatatacatgtatgtgttggagtataaagagggacagtataggggagaagtcactgcttgggcttctctgtccttaggcatgaataggtttgttgtagcaacattaaacttcagcattggtagagctagggtgcggctgagctcagggactggctgaataacactccttggatttgcactctactccatcagctccatacagggcaccacccctttatccctgagagcttccagctcaggctgcttcagtacggggacatgctgggtttttctgagcatgagctgtggtgcagatggcatttatcccagttatcagagaaaggcagtaattgcaaagtgaacttggagacaggcagccgacagcttcactctctctctcctgctatgtatcttctcttacatggatccagaccatcaccagcttgttctccctttaaaatgggaaatgtgataatgtcagtctctggtttaattccagggttgcattcctgcagcctctgtcacaaagcttgaacctcttatcagagcttctcaaggtatggttatctgaccccagctcaccactctctctcttaccccaccagactccacagtccagaagttcacttgtgatttgcattcccaggttgtttgtcgaggaacattgccttagtgtgttcgtccaacccagtgaagagactcctaactcctatctcatgccaggagtaatgttaatgtctacctcacaccaacgactggggctcttacatttgatcagacatctcttcaggaggagctaccaaaaggatgatgaatcttcagggagggggcaacaagccaagttaaggggaaaacttctccagagagtttactgtgtttgtggccagagcatcctagcatatccgtttcagacagtcaactgggctatctggtggtcaggaccagagccagagacaaatctacataatagagccattgatcactgtcatcaggtgcagccagctgtggcctgggggagaatgtttttttttttttttttcagagatgttctcacaaggagatgagtccttcataggaggcttttaagaatgtagcacaggtcggtcagtgtgagaaggttctttactgctcaagttttgtttttgcaatgaatgaactttaaaatcgttcttcttgggttcttggaacttggggttgatgcttgctcctgcatgatggttgcccatgctgaaactggaaagctttgtttcctttcaatcctctgaatcatagttttctactgtgattaggatgcaattttccctgtatattgcaatagcccgatgttggcaaaattcagcctttgcatgctgcaactattgtaatggtgtgcctttcatattttgtccctaaagagttctgctacaggggctgaggggatggcttggctaggaaagtgcctgctgtgcgtgaggctagcaagatgactcagctacagagagggtgtgctgccaagtctgatgacccagtgtcaatccccagaatccatatggctaaaggagagaaccaactcctaaaaaatgtgttctgactacacatgtgctgtataacatatgtgtatgcacatatacaaccattgctacctcaacaataaatatgaatgtttaaaaaataaagataaagttaggcacaagagtgtggtctgttatctagccctggggaggacaggcagaaacaggcagatacctgaagctcattggctattcgtcctagctagcccacaagtttcagtttcagtgagataccttgtttcaaacagtaaaggatagagttattgaagaaggtagccagcctcaacatctgtcctctgagacaggctgactccatgataggctacaagttggcagttcaggaaactgggcctaagtttctgtttctaagaactgggcaagtccaggcaagtcagttactgaaaaaaaaacaaaaacaaaaacaaaacaaaaaaaaaacaaaaaaaaaaaaacccaggccttaggctgccagtcagaaatttccctgtcatcagaagctaccctgccacctggcttgaggcaagggcaatgggtcagcaacagtttccagacttccccagcaacagtttccagaccccagcaatggttctagaatgtccctagagacagagccaacagattaagataaattcatctacccctcaagggaattcccctaatgtgctttaaattgggcctttgaactcacttgggggtctccatctttgtaacaggataccccaaatgttgggcttctgcagaataaagcactctttgctttttcatactatttgagttgtggagtcaaccacagatccttacacctctatacacatgcacttgtgtatatgtacacacacacacacacacacacacacacacagagagagagagagagagagagagagagagagagagagagagagagagagagagagaaagaaagagagaagtttgtgatctttgtatccccacaggattctttatttattgctgtttcctgtctcattctggatccttatatgttgaaagcaattttattaataatggtcttggcagctatgttttttttgtttctgactctaaaggacattccttgtttattcaccacaaaagagaaatagcttattacctgaattttcagcatagcatataccattcacatccttttggtttaagcaactgttaactcatgactctatctaagtacttagttaccacatgtcttagttcatttgtgttaccgtaacatcaaaaataaaaactccataggctaagtaattatagagaacagatttcatttctaatgttctaagaaggtaggaagtccacagtgatagcagcaacctggtaagtgtaggctggaggtcaagttctttcttccaaggaggagcctggaacattgtgacttcaaatggcagacatcaaaaggctggtagatctgaactagtttcctccatccattttctaaggcaccaatccacctatgtgggtgaagcacttaggacataatcacttcctccaaagatgccaccatttactacccaacagagttaggcttcagtgtgagccttgaaaggacttcagactaaagcataatctgcctccccaagagactggagcctccgtgtgggttcttcatttcatcacccagcacacagcaagtactcagtaaaagactgttcaaataatacatggtttcccccctccaagtgtgaaagccttagttttcattcttaggtcctagagatactgcttttcttaagaaatttatatttgacattgccaaatatggatatatttgtcctctgagatgacacttgtgctgcagataataggaattctgggctagagagatggcttcataaataggagtactggttgctctcccagaagatcccagttcaattcccagcacccacagggtagctcacaactcaagtcccagggaatttaatgttcccttttggcccccagtggcactggacagactcggtacacagatacacaggcaaaatgctcacacatgtaacattaagatataagatgaattctgtggtggaattttaattgtaaggatgttcaacttcttgagatagattctcctttgtagtagatgtacatgatcttattcctttaggattactatgcttgtctgtacttaagtttggacataactgcttttgtttttctttttgtgaatctgcttcagcctctcctgttactgagttcatgtgggagacctccagctatgaggtcaattctttccacccagaaaagagacttacagtcatatcagcaatgtacaaaattgtccatctagcaaaactctgttatcattttaatttttgagatttatttttattctatgtgtatattttacctgcatatatgccagtaaacatgaagtgctggcagaagccagaagagggtgccaggtcctctgaaactggagttacagatggttatgaatttatacgtaggcactaagaatgaacttgggtccctgggagaaaagccaatgatcttaaccactaagccatctcttcaaacccctctattaccatgttaatttcctctcactagtagaaaagcataccaggatatttaactgaaacttgctcttatttgatttctagtgaggttgaccctcacttcacccattggtgatccttgtgggcttctccttcacttctcagttcttcctgttggcagaaccatcctttttagtgattcatgagaactttttctgttttaaggacattgactttctctaccatgcatatttatagattttctattttgctcttttatttttaatacgatttggctgtaggtttcaaaaaataaaacatgatccaaactcaatcgctctgtatttcaagacgtattttttttcattgacttgaatgagcaaaagtataaaataaagatcaaacaaacagcatacttcatctgctaattactttatgatttcatattgcattgggctacttgactgaatgttcctcttgtttatagaccaagtgtccttttctttgaccacagagtagtgtaagcccttcctctatgaagtttcggaaaggagaaatgtcaccgaggggatgtccatggggcagccatgctgccaagaaactgtaggaattccctggggtagatggtggtaataattccctccataggctactgttgccttctccatattcaggaggctagggtaagagacttgcagagtgcaaaacttaaaagttggtaacttgtaaaaatatttctgtttgtttcctgggttgccccctgccccaagtcttatacagggaggaaacagctctccaaaaggcctttggactctctctcttaaggggagctgatttccttcctggaaatttccatttagaatcactctgtcctcagctctgaattttccttgggtcttgcataattcttgctgtaaggtggtcttgttggtatctgtgactgtccctggagtgagccttactatggtgcttctgtgtggagtatatgaatggtatgatagacatagttatgaatgagtgctagacttataataggccatgtatgtagaagacatctccttactccctagtgtgttgccccactccaccccaaagctttcttttctccctatgtgtggttataaaattattttcgttcaccatgtatggctatcctaagagtcaaggcaagtctctactttgcaaatgacaaggctatacatatgtgcctgtactttctattatcataactgaaaattaattttggcatcaataattttatttaaagttggaggttgctactctggccagtgtttatactacagctgtggaagtattgaccctgttgacatgtcatttggggatctgataacctagtaggattgacatccagcccccccacccccactctgagtctgtcagtggtagagtcctgttggtttgcaagcaaaagtctaaatatttagaaaccctaagctcctctgtgaaaacaaggacaaaaatgaatatttatgatccaataattctgtaactgtcttggacatcatccctttgctgacacctacaagcctgtcacagtttggacagaagccagagctctgcctggcaatgcatcactagctctgtgaccttgatcaagtcactcaccctctctgactctgtcccctccatcgtaaaattgtaaggaaaatgctaatctcacagtatttgctcttcatgttaaataattcaacatattctggggagtatagactagtaccaagtacacaatagatgctcaataaagttattgtcttgcatgttacttgactgagatgtctgtcattctgtccccccaactgtagcagaatctcaatgttttaggggcaggggtgatgttgccttagggcatatgagcttcaacagcttaccataaattaggcaacttatgaacaacagaaatttatttttcacaaccaagataaagatataagcagactcagtatttggcaaggtccgacttcttcagaagtataattttcttgtaatgtccccacatgcagaaagagataactttctggtgcctctatgaaacaggcaatataaaaagcaataatgcttctcacccaacaatctcctaagaccttacttgctaagatcacactgtgaaaccttaaagcatgctcctggtgacacacctcctccctcaaagccacacctcctagttcctcccaaacagcaactaagacaggaagcaaaaggctgttggagtctcctagaatatggtggcagatatcacctcccactcttcaagctacctcagtctgcttatatcaagctaccaggagagaggggttcttgagaaatatcattatggtggtagttggttaacttctatgctgactcaggccagatgatctcctacaaattccctgtttgaagaccctagtcttgtgatgggttcatttaaacagccatatgagagtggccacaaccctgctatactatatgggacctgcagactacagggtagattgttggatttctttcccaacagctgtggaaaaatcattggagaacttcaatgttttagcagcagtatatgtaggttctatttattaaatcctagctgtgtctggatgctattctaagggatttgcacgtagtatttcagttattactgaggttaggacatactgcttccctcttaatagactgagggaggccgagaagttaagcatctttcctaaagtctcaacattggtaaatagcaaagtcaacaatctcagacacaataggagactgtgtcctgcagtttgagaaagggcatgtactagtcatgatcagagagaaggaacacagtctgtttcctgaacagaatgcttgcttcaccctctgacttgaacaggtgtacctgagtgttcctggggctaaggagaagacttgacatatggtaaaggtgtgggtccctatccctgacccttatctggagctgatgcctgagaggtctgacaaggcagagaagcccttatcaggacacacagctgcttcctgggctgtttcccccagggaatggcaggacactaaagacatcagcattcaacaccattgcccacacatacgaattaatgtggttcagagcctaaactttagatacatccatggctcctagcaagcaggctaaattacttgggatgaagaagaatggattgtggacatgggatggttggctggactaaacataaaggtagtcacagagctagaggaacctatattatttgtctgttttttgagggaagaagaaaattattaaagatttaagtgaggcagttgtttaggtaagatgtttctgtcaaggaaatatacttttgaagaaatataaaatttccctaaatatatgtatcagactggttttccagaaaattctgagcaatacatgaaaatgattgggtatcgtggatatgcaactagaaaatccatccagatcttgagtcagagtcagtctctctctctctctctctctctctctctctctctctctctctctctcattttatgggcttcatcttcatcatgcttcctttggcctgtctgatccttgctttgttgtaatactggctttattcctcatcgctgagctgtgggttctctggcacgtgtttctaaggctttgtgtcttcagcctgcagaagaataattctggccatcaccactactggctcttcacattctaacagtttacattgtgttctcattgcctctagacaccattgtgcatgtgtatggccattggctccagtcaccaaactgacaaagaaattccaggaagtggggaggtagttttcaatgcaggagacttggatgaatggggcagtgaacctctccagcatatcccgatttagagtcctagctgttgatttcttgattctttcctctttgagacaaatctgttagcaagaaagcttgctattagataaaagagatagtgttggaaagatacagcccctccctcctcactaagccacacttggattagatagcctgggagtattatgagccccggagggtacttagttctctgaggccaacagtgaactcagcaaaacagtgataaagcaagaaaccagtgtgagcagggtctactctatgctcatattcagagaaatcagaagccaatttctactgctactattttatcaaatgtctttcatgaaatttttgatatttttcttttttttaggtatatatttcatttacatttccaatgttatcccaaaagtcccccacacccctttcccagccactcccccacccacccactcccacttcttggccctggtgttcccaatatttttcaatgaaagggccttcatctgaattgatggaattattccaccacccacacaaaacaccctgtgcctttgacctgcaaacctttggtatgcgggtaatgagtcttgggtggttttcttataagcttaataggaggtccagatgtagaccatataaagaggtcctgttactttggatgctatcctggccatatatcttgtctgtgatgatgctctactgaatctcagccctgatacctgaccctggaaggccaaactttaaagtgacacagaacatctctgagaatgttccctgtagagaacactgctcataacaaccttctccttgcagtattcagaactgcacacttgtaggatttagctttgggtagccatattgagtgatggttattatttttgcaaagctcaatgttctgaatttgtgtgatcattttttttctgcccatgaccatgttcttctccttctaccttactagacggctgataaaccaagcagctggactagtaggctgaaccagaggctgggctctatagcatcccccaggcccagagggttttaagggagtttcattgcaccaatctctttttcccaggtatccagggcgagattattgtggtagagtcccaggattctgcatctttggtgtgaattggagcagtcacatttaggatcaatggctacctttaaaaaacaaacagtaaactcttgacagctgtttctcaccatgcatactgtctcagtaattgtcagtgactacaggttagacaccggaggccagaagttgatgtctgatgtcttcttctatcatcttgtacattttagtatgatttacaaggttggagatacagatatagaccacataaagaggtcctgttactttgagcgctattcaggctcataacactgctcataacaacatttgtaacttaacaactaaacagttagtataatgtttagtaaaacaaccataacaacatacacatatgcagacacacacttgggagcatacccagacacccagacagacagacagacacacacacacacacacacacacacacacacacacacacacacacacacagcagaggcaaaatcccaaggtgattttcccttccagttgaggttttgtttctccctacagtggctgcctagtgaggcatggctctagaaggccaggcaatcacactgcccactatgtgggcttcacgagacaatctccagcttaggaccctgagtttttttcaatcagttaggtctatgtgggctgtatagttagtgaaatggctggaggtattgagagtggaaaccattcttgtctgacatgggcacatacattccgacagcactggccaaaggcagaattacaggctaacaatgcaagagttgtgtctcttttgtctctgaaggaatttggatggtttgtagatgaacccctggcattgcctaagggatcatgtctcacgcaggacagaaggaagaactggacagaggtgacagttataacaacacattaggggtgcttgggagcccccagtgcagaattagacccaattggtcaataagaaggtaaaataagaagagaagcaactgccagaatctttcaagagctgaagcatcagacttacatacatgcctgtttgcagagagcattgactttcaatagacagagagatccacattgctcatagtcagcaacctgctccttctaggggagcctggggcagtgagaagtttagaacatggggtagagagaggcagagacagagacagagacagagacagagacagagacagagacagagacagagagttttacatgcatgtgctgcacacatgcatgtagagctaacaagcttagccatctgagttctgccagtagatactcaggaaaagaaagggaggcttggtctgggtgtccccggacctgggcttccccatagaggtacctttattcctttgtcataaattaggattctagaaaaatgtgggtggcagggaagatattgtctacaaggtcttgctctgggctgagtcatagctacactgaaggtatagtgactagttttctctatgggcactgtgggaaactcctctggaacagaatagagcacacagacaaatagcatgtgcccctggcaattgcctgcttgagagagcattccaaggcagtgtttatggggatgtgctgggagcagtagtactctgacattagagcaagtggtatgctcagcaccagaaggtgctctcccctcccatgagagctgtatcacttaattcacatcctaattctcaatgtatagattccaggaggaggctctgacattactgactactctagatcatttgttacagggtaccctccttatcccaagaggtgaaaatgggttgtggttatagtgatcgcaagtgattaaaagtgtcttcctcctcccattttacacctaacacacacaccagggatgtccaatcaaaagcccagtggccatatgtggccaaagattgtgtgtatgtgtgtctatgtgtgtgtgtgtatgtctgtgtgtgtgtgtgtgtgtgtgtgtgtgtgtatgtctgtgtctctatgtgtatgtgtctgtgtgtgtatctgtgtgcatgaatacatatgtatttgtgcatgtggggactttgagatcaaccttgcatgtcaccctcaggagccatccaccttgcttttgagacagagcttctcactcacctatggcttgccaattcacccaggctggctggtcagtgagccctagagacctatgtacccagagctggggtcacaagtgagtgtcatgatgtccagcttttacttttcacaaggtgcttggggaaaaactcaggtccccatgcttgcggaacaagcattttaccaaccgaaccacaagtaaaccacactagattttagtagggaaacagaatagctggtcctttaataattctgtgttgattatatatctagggaaacagaatagctggtcctttaataattttgtgttgattatatatctagggaaacagaaaagctggtcctttaataattttgtgttgattatgtatcaaaagaataactttgactacattggttacataaagtatatgacccagattaatttcaccagcctcttccttctttttctccttgaggttcttagaaaacaccaagatcacaaatgtgccccactctctgcttgtaaccggcattattgctctacagggccatctgtataagggatacaccggagtctttggtctcgcgctgtgcagtgccttgccatgcattgtctggctacagctccagaagaacccactcattctgtggccgtagccaagtctcttagcctccctgagtctcaacttcctctccctacatccaactctcctctgagcacattgcaaatggaaaggtcccctcaggctgtgaatctggggccacatagtacaagagacaggttcctcaaaactagctttacaggaggagatgtcatgtgctgtgtgtctgtctgctcctaaggtgatagcaagggaccaagttaaaaagagaccttgtgacaggaaagcacaaggttggggagaatgttagataaaaagtcgtgttaaccaaggaaggagaaaacaaacactcatgtttgtttctggggaggagcagacctatccctccaaataggctctttgcaaagctttccatgataaacggaaactaataaaactgctctcatgaacgctgccctgctgggtggaattggtggctcgatctgtgatcaggccgcccttttattccctttttaatgcctaatgccatgggggagagaaatcaattctattttaatttcatgagaaaaatgctgaatggaagaaaaatgcaatagagcgaaacttcccaattcagtcctccactgtgttcccccaacacggaattctgtgatcaatggatttctccctagaaaggtctcaaaagcctgcccctgccttttcctcagacaaggaggcaggaagcgccatgctggtaagagaaactccttagagaggtaaggaaatttaattcaaccttggtgccttaacttacccgactgtctaaaatcatttctgcctaactccccttaattttagcttctgtgtgtccactgtcctaactaggagctctgctgattatccctactcagtaaaccccactaaaacctcccagtcaaagattcctccacaaacaagagttcaggagcaaacaagttttccaggcctggagagccagatggtgccaactcttcaagagcactacagagcacagagtcaggccagtggattctgggttcttgccagctttgaaatcataaacttacaaaattataatgattttccccaagccttagttgcctctctgtagaacgggaaccggagtggcaggagtctctggtctaatttggtgtttccatgagtagtgtttggaaggtgctcttcaggatgccggagaaaagatgatgcaagtaaatgttcttgtgtgtcaatgttgtgatttacggtaaatgtttacaatgatacacaagggtatcctggcttagccattctaacttggactctcagtagagtacccgggggaggtcacctacatgacacattcaatgcttcatgataaagtgaacttcttattccatgattctcttcgactgtaggcttagtgttctaagaacaccggaaaggctagccaggagtggtggcttattcctagaatgccttgggaggctgaggcatggggaaccacacagttgaagccagcctaggctatatggtgagctataaatagcctgaaatacataggggaaccctgactgaagtcggcatcatcggcggcggcggcggcatcatcatcatcatcatcatcgtcatcatctatgctatttaggagaggcacattaaatgtacttttcaacttgattatattcggccatgactctatcataagttgaggtacttttgtgattagagttgaggatatagcctttgcctgtggcccagggatgtcatgattcatgggacaaatgtacctttattttttctttctattaagtcatctctcatatgttacatcctgacaagtttcctctttctcccctcccccagtgtctcctccaccccatccctttcctccccatatccatcccctccccattttacctcccctcagaaaagagcaagccttccagggacatcaaccaatgcagcatgacaagctacaataagaccaggcacatatcctcacaccaaggttggatgaggcaattcagtagaaaaacaaagggtcccaaaggcaggctaaaaagtcagagacatcccagctcccactgttaggagtcccacaagaacaccaaactacacagccatatgtagaggatctagatcagacccgaacaggctccctgatctctgtgaacccacttgagtcagttgattcagtgggctgtgttcttgtggggtccttgattctgctggctcttccaatctttcttccccttcctccacaggaattcccaaattccacccaatatttggttgtgggacactgcatctgatgccatcagttgctacatgaagtctctctgatgatgaatatgctaggctccagtcccagcacatcgggcaggcagcacatcaagcaggcaggacaaagtataggtgaggggttttgtgggtgggttggtgttttggatcccataacttggtggctttaaggccacctttttattcacttcctaaatcctacaagatggggagaaaaatcaatgagatgaccccacatttgtgtctcatatctttaaaaaaatgtgtttaagaattacttaatactagcagtattaaggcccatccctaattttagtccacactctcaaattcctgtagagttagttgggctttacagtatctcctgccagtagtataaaagtgactaacacactgggcaagtccctcttgtggtaggacaaccataggtccacacagctgatcctctcacccctagaaaccggccacccaggctggtgtcaggctaggtagtagaattaaaaattgaggacacctgcagaaaaatgtccctacttcaaccctcctgtgctatatcaggctttgctggctgtatcttctgaagccttatttattcaggaaattctgtcgactgctgccctataacaacatggttgtttgcccagtcaccaaaagtaaaagaaccttcaatggagggtgcggccagccagcctctgctaaggttgttggtgtggcttcaaggttcccaagagcagtgtcatggagtaacaaacttctcccatatgcctgcttgaagccaactggggaggaattcaccctggacctcagcagtttaaccagattcaagttagcaaaacggaaattgactgggtgtgaagttgggagggcaagcggcttacattcagaaactgagtcgtattgctttgctggctcaaagccactgggaatagcactagacagactcattaggcaagaagggttctgtgaaagtgacaaaatcattgcaccccagataccccagcatgagattaaacactgaagggaggtttaagcttcatattaggaagtggcattatgacagtttaggcaaaaggagctttacagctgtctgagatgatggtggccctgcaatgggatcatctctgtgaaactgtaagaactcccttcctgtgcagggtggaggatgggagtgaggagcaggaactaggccagaagtagggcctggagagcgactggtagaggaggcagctgttgacaggaacccatgcacttggaccctgcatgaaagctgaaggatgacaatggtttgggaagagaaggcattgagtggaaaggacatttatatcagtttctgtctcttcccttactgaccagccttgtgacattggctgtaaatacaagtcaccctgagtcagcaccagtaaagtcttactacatagccaggctggtctctctctacctcctgcctctgcctcctaagtgatgggatggattacaggtgtgcgccatcggacctggtctcagcattttattttgaaataattttacattctcacagagaatttgcgaaaacaaaatgatacaaatgtacacacacacacacacacacacacacatctaatagagttctctacactgtacccaagtatcctacaaattaacctctttcagaagcatgatatacttacccaaagtaaagaatgacaattcccctctgtatttgatagagaagagctcagactttgaggatcacacttctacctgtggcctctttttctttgccaggttcccacatggcagtgagttgacatgtctccttgttctccaccatggcaactcttccctgtagcccatctctatttctctcctttctcccatctctccctctccttccatcatctctccttgttctttccagccaaaccaatcactctggggcctgcctatcccaaggccttgcctctattttttcccccagagtctatagctatgtcagcttcacctatctctctccataccaccagattccaatacatagcccaaccggaagttagttttcagaagctgtcagctccagtggtagcccaactggcctctgactgtgcatagaagttctggtgcccaggcactttccctggctctccattcttccaaactcaggaatatataatgatagcaccagtagtaatcgcccttctgctgttatatataggggaaagggccactgtgaccaggaagtgtccagcaagttcactgaaaacatccgtcttccactcctcttccagaaagggacattcctattgatatttaacgtatcttggtaccaaaaatcaacactgttctttctaataagaggaattgtcttgagctggcccccttctgagatgtgtgccctgcagccccctgggtcgctgtggtcaagtgtaggatcatattcgcagtgcttctgaagagggagaaaaggacctgctgttctgagcttaaggaagagctcttaacccctttatttactgaacagactccttctgcttcccaggatcctgctaaaactctggtctacagagccttgaccacatcactctcctcagctgaggaatgaggacaaccacaaagagtctaagccatttctttttaggattatattatttgtatgtgaaaatgtttcccctccaaaggacttagagtaaaatgtatatttcaaagaaatactatttttttattatgctgtgcttgagagccccggtcaggtgactcttacctactttatctcctctttagccctatgttccctcttcttggcctcagaatcatttttctgtctgttctctcagaacaagactgactgctgagcctcacccctgacctggccagcatcaggagcagactttcctggtggggccttttgaagggctgctatatttctcatcccctccattcaactctggtggaagaacagcctattcctcacaggatgtccctgtgtccactgaagctagggtcttggtgcagaagttaaggttgcctacatcgtagctggagcctcatccctgcacatgggggttgccttcttagagtaaagaaactagatgtcggtcactctgcaacagaaacggaaattagaacctgtgttttagctttaaagaaccagaggctcagagaggttgagcaaactgcccagtcacacagctaatatgtttgcttgttttcacaaacaagttgaggaaatgttgaacaatgagaaaaactcttctactggctggggagatgactgagtcagcatctccttgcaaccacaaggatgtgagttcaatccccagaaccccaccacacaaaaatgatggtatgtgcttgtatttttagcagaaccccctaaagcttgctagcttgcttcaggataataaatacctgtcccaaaagtaaagtggatggtgctcttgaggaaagccactcaagtgtgtcatctgaatgctacacacatgtgcacacacatgttcatgcatccacacacatatgtacccacacacttgtgggcctgcgtatacacatgaacactcatgatgaacaggcacacacacagagatgtgcttctagcatagtgtatgggtcgggaacctttctgtataaaaggtcagagggcatgcttcgtatgaagcaggtgattgctggatttgacttgtggtctctgttctgtccatctctaggttaccaaaagtcaaacaaaaacagggagattgggagagacttattgatgaaatcattgcacgattaatataaagttattgaatcaaagcagaaatgatgtgtctacgtgtctttgagaatatagggaagggctaactgagagccacagaaggttttcatgcaaagtatcgccttaagtgagaaatacaaagatgaggagtcacaacaaaaggagagagcatgggaagaaagaggtgttctaggtaacaccttaacttgttcaaatgccccatggttaaatggactgtaagtctttgcaagtagtgaaatctggctttcaggtcaatggggaggccagaaatcagctcagatcttaagctggctaactctaagggccacagaggcagtctcaccctgaaaaaccaagggaaaacacacttctcatgatgagatacgtgagatttctagctagtaatcccactgtgaccagacagagaaaagaacagcctccagcattttgctatagccagatctagtctccagacccctggactggggcttagctggacgagccccccccctcatggttgcaatcctagtaattgtcccctttcccacactgctgaagagaaactcccatcaccttctttattggtggccatggctccagtccctttcttctttctctccccaacctgattcccccactaactttgtaaaacttgccagttaaatttttcaaagactgtttctgacaaagcagtgggaattagatttggcaaagcccttcataaaaaattgaagacatgctatattaacatacattgatttattcatagtgtttcattacaagtaagtgaggatcctgtaataccaggaaaggttaggagagcaggggagcgtggtatattatattgacagctccgtagaaacccagtcgcttttggattgaatttggatcataggaagatgctggctagtaaataaggcatgagctttcgctccctgtgtctgtatcagtggagttgctaccaggccaggcaggtcaatagaacagatttttaagaaaatacagagacagatcctctccactggttcactgggatccctggccccaggcacaccctgagcatctccctcttctgttgctaggaaacaggagtctggccatacactttccccaacttgccctctcctctgtcatcaccttggacttctctctatgtgagcctttcccaacctcaggcccttgccctgtctattgtctctgcctggagcctagaggacttttctatccactctgactccactccatgcttcaggtttgcatcttttctctcccaagttccttcccctaagcatcaaatcttggttcagcgttgctcagatgcagcctctaagcaaatgatctgatgctgagcaaatgattgagaaacttaagaaacaccagtttaagaaaaaaggaagaaataggctgagaaacagaaagtaaggtagccagtaaatatgactaatatatatatgtgtatatatatatatatatacacatatatacacacatacataaaaatatattatatagtaaatatatattatatagtaaataaacattttaaattaaataataaattagtcaatttataataagtaaaatttttattttactatattattttattattttgtttaatttatgtctgtgtgtgtgtgtgtgtgcattcatacacatgcttggatgtgtgctgtgacatgaatgtgaaggtcagaaacgatgtaaatacagctaaatccccaggttattaaaggatctagtgaattaatgaggtcacttggtgtatgccaaccaggaaaacatggagcggtgggggcctacagtgtttgcctctgagcttgggttggagagatagtcctatcagaacactgtgacgttgctagtctcctctggatgggtgtgcttgtttagactcagcttataaagtccaagctgtgagcacatggaatgtgtcttctagcatcactctgatcctagccaagtcaggcctctctcattaagtatatagcaccattgctgtatcacaactgccttacacaggagagggaaatcaccctgtctccaatgtgtctgccacctatgccagggatcagaaaatgttcaccttcttgataagaatatggacgtcctctttggcctgggttggctgttctagaagcacggaatctatgtatgtatgtatgtatgtatgtatgtatgtatgtatgcatgcatgcatgtatgtatgtatttatttattatctaaatgctgtgtgtgtgtgtgtgtgtgtgtgtgtacaggtgccatgctgcacatatagaggtcagaagacaaccattaggaattagttctcttttctgacctaactaaagaagggtctcttgtatctgctgccacactgcatactcctcgctaattggttggtgagattgctgtttctgcttctgagcttgtcatgagaacactggaatatagatgcacaccaccacatccaattttaatggggttacaggcatcacacttggtttgcatggctagtaacttgcacaagatcgagccagagaaactttgatatggtggggtggggatcactgatggcttttggagagggaaacacagttttctttaaagatatggcctctgaaaagttagctgttcttcagtggatggccccataccaatgagtatatgctcaacacaaacttgattcagtaagctttggaaaagaaaaaaaaatggagctggagagatggctcagtggtggttaagagcacttgctgccctcatagaggacctgggttcaattcctagcacccacaccaagcatctcacagtcttctgtaactccagttctaggggatccaaagctctcttctggactctgtgggtaccaggcatatatatggagcccacacttacatgcaggcaagtgctaataatataaaataaaaacaaagcaataaatcttcacagagttggaggaggtggggtaggaggtggggggagttagggggaagagtaaggattgcatgtgatcataatactctgaaattaataaaaatattatgttaaaagaatcctgtgcaggctactgtaaaagcaatgcaatccaggctcctgacactcacactgtcatccatggaagacagcttatcgtatagttaccattagttacgttgacagtagggcaaatgaagaaattgagggaggggacctcaagacttaaataccctggcatttccatgacatctaccttgtgaccagcagacacagacattgcagaatatgaaagggtcagattgttgtcaactcagtatcatggagtatggtcttcacattaacatctgtctgcagtacacctggattggaagacacaacactgagaccccatcacagatggttcggaaagtttaatgcaagttattaccagccaggcagctcactattctgattcttccaactagatgtgacaaaacattactggtgtgtaggatagaatacatggtctatattctttggcatgtctgtgccatatatgtatatgcatgttatcctgggtatggggggtgtatgtgcatatggaagtcggaggttggtcctgggaattctttctgatgattctcccaccctgttcattaaggtaggttctttgcatcagagcttaacatacaggaagtatcacaagggaaccactatgcctgtgtggcatttatatggattctgggggtctgaactccaaaccttttgctttccacctgtcatttacatggattcaactgaacccttgttgccttgtgagcaatccctgtcctataggggattctgtattttaaacacaccctatcctgtattttaaacacaggagatactatactttggaaagggctagtccaattgattaatgttcaataccagatacataccagatctctaagatttaaaatgagttttagaatgtgaactacctcattaatgttttggtgttgatagcagactaaaatgatagtattgtttggatgtatcaagtacatcaagatatattaataagatacatttgctttgttgttactacagtatatttccactagtaggttttcttctttgacaatttgatacatgcatgtaatattttctgagtaccctcttatgctctcatcttccttccaatatttctagcctctacttccctactgatttctttccagatttcatatcttttgtcttgtgtccccctgcatctaagttaggccatcttacgtgtgatcctggatttggaccactcacctgagcctggtaggtttgccagtggcttcaccactagatactatgcctccccctcacatagtctgttagctgccaataattcagcagtaagtggcaaggctccatgagcctctccctagtccatagctgactgttggctggggcattcttttgcaggttcagtgttaataacaacaacagatataaattcatgatttccatgacattgtcatgcttaaaagaatatatttagcagcctttcagtctatctttgggcttgtaaattctttccacatcaccttcgtaatgatctttgtaatcatctccttaggacatggtatgaatgtcttgtttggggctaagcctttaactatcatttattctcagcatcctgtccagccagaagttctaaatgcactgctccttactgcaaagataggcttctctaattagggctaagcgtatcctttgtaggtataaacacagatgcatggaaggcagcttgaggttatatcagcttatgttattagctaagctacagtgtacttttcccccactggggcacatgctcagttacaaatgtttcactaggcatacaataccagggatgcgttctctcatggagtgggcctcaagtccaagagcagtcggttgctcatatagtattcctgccattattgtaccagtgagcccgtcttctctgacaggttgatagtgtagttcatagagatcacagctgagtaaaccattaatatctttccttcctgcagcagtctgtagcactgttggacataatagtgagaagtctccagcagagaggaagcttctagctcaattccagtttgattcctttatactttgcattcaagatctgtggtgccttcaggaacagtctccctaaccaacagccacagcggtatcccacacccggcactggacattttgtttagtggcccactgctcctaggactgacattatcaagtcatggaaggcatctgccatcaaatttctttttgttttgtaaactggatcatgagataacaaagatagcaagtttctatccttaggtggcatttcatatcctctttctttttgttaacccctacctattctcccatcttcccctcttccctccctcatcctgattaaagcttcccacctccagctccagcatcctccctacccacccataattttacctttgtgctactgtctcctctcccttggtgtaactcctctacagctgccctctctgtaaactctagcttaaggtatcatgttctgattgggttagacatggttgttccatgggcttgttggtagaaaactcagggctgtggttgtgtgtactatggatggtacaaagcagctctgtcacatagtggcttagcttacctctcttctccatcctgcccctgctgcccctctctagtgagttctcttggttagtgagtaggacatttatgtgcttgtatatcattttgtcacacagattaactacaaggctgtgggctcactggatccaagtgctgacctctccagccagaggggaaaggtgttcaaactccggaatgaaacccaccacctctttgtgggtctgtaccctgggactacctactctttcaccatcaaggccagcacagccaagggctttggacccccagtcactactcggattgccaccaagatttcaggtatctctttagagagagaaaagtgggggatatgcactatacactccttctcttgtaggcttggtaattttctggaataaaaagagacagaaccaactatcattgatggcaatggaacgatttagacaatgatttaaggtcattgggttgctcaaagtccaattcctgaggttcattaagaggggggcaagaatgagcgaatgagggagagagagagagagagagagggagagagagagggagggagggagagagagagaacgagagaagttatagttgttttgtagacttattttccaaatagaatactttgtagtataagatacccccagtactggctctcatgaaatatcagatgaagggataaagggatgaaggaatgaatggccaagctgcaatagcctaagattgcaaactgttctaccagcagggtgcaccaccctgcctgacagcaagaagcagaaccactgcagaatgcttatttacagcttccctattttggactatctatgcaatctagtctgcatgcatatgtattttgcagaagccatgattttccgtagcttaatgtttccacttatccttctcccctaagtatttcccacactgctttcattataatgttctgtcaactggatggacgtaatttaattaaacagtcccttgtggttgaatatatttggtgtttctacgtttttataaaatagcgctccaataaacatgttacaaaataaactttaaatcgttgattgggattataactttaggattaaattcagaaattgaaaaaaagaattaaaagagatgtgggttttaatagctcataatacaaatggctaaattaccctttcaaaggattagatttagtcacactcctgtggggggaaagggtcttgtgaaaaaaaaaaatggagctagttcatcttccctttaatttgcatctaaatgcacataacaaggctgactctcgtcatgtctttataaagtacttacatgtcccatgtattcctttttttttctgggtaggaggggcacatttttatgataggcatgcctgatgcctcctcagactatagcactgggagagaagtagatgggaagccaaggcctcccctattgatggcctctgacatcatggtgtccttactaccactcactacctctgttctgctgggatgggatcaaggggataggatgagataggataggaagtgtcgaggggtgtatgggacatgtgcttgatcacttccaatttctctctctttcccagctccatcaatgcctgaatatgacgcagataccccactcaatgaaacagatacaaccatcacggtgatgctcaaacccgcccagtccaggggagccccagtcaggtgaggaactatggtctgcacttctcccttctatacctcacacatctccatgtgaagcacatgactggcaatgttcctggcttcaataagccagaagctagatttgctacaaggaagatggtcagcaactctaagcccaatttggaaggagacactgagccaggatcttcctcacagtgaacatcagtttaaagagaacatcctgataggggcctaaaatggccagggagagaaatttctagaacataattaaggaaaatgtagtttgtgggtggaaaacctatacccagtgcttttgcaatattgcctgattcactgctctaatagacagacaaatagacagacacgcagtcgggcagacaggcagactctgaattctccaaagaatctgatcacagattccaaataggatgagccctagcagagactcctttccattcagaactatgaggtgctagagtcccatggggccatccatgcctgcaatatcccgctgcttattttagtgagagtttgttggggctcaaatgggcacacaggcaccaagaacagaatcttatcagctaggttgaccagggcaagttcatagctgtcaggatggattgtcattcattcattgtacaaggtaacagtgttgactgctgggtttgctcaaaactccaagcctcgagccctcagtccatcaaaataggtagaatgttaggtagaacttccaaatgggctcaattcaacccagcaagcatggaccaggtctctttatataatgaatgggatgtgggagctgttgttcagactagagtaacagagacagacgtatgacatagttacaatgctatgacgcctcatggaaatcttcacaggacttataagcacttagaaagaactcccagagaaggtgacactgagctgaataaagtttgacttgttacaagagtccagtatgatccaggagaatggtggcttgttaaaatcaaaacacccatgcctagtttagtttgtcttaaactaaagagcaagctggggatggggagatggataagaaacagggtgcgtgtgggaggctcaggctaatttgagagccatgggatctacgagagattggctttttagaggcctcaccttgcatgcctctgggggctgggagacaagcccagaggaagcttttgagatagctagtcctgatcttcattttcacccttcattcaactctacccagaaagtatgtgatgggggcaacagaatgaagccacagaaatgcagaagttttggcctagtctgaagactgggggatgaccctctttactaggcccagggaaactgaccagccatgtgttggggtgctgcttatgggcctcttactacagcgtgtcaaaactgtctttcctctaataatctaaagcagatgctggcatttcataccaaggtacccattccctgctttccctctagctgctctgacacaatgttctcatttagttttccatatagacagcgagatggtatcttcattttcagaccaggaagctcaggtgtagaaatgagggtatcgaaggagccacatcatactgctgtgtacccatcatctgtacagcattccattcatcagacatctgtaaagctcccagatttaagatttggaaattgagacaaacagaagctgatgagtttatgtataccatgaaacaattagaccaggcaagacagaagccccgttctgacccttaccccacgttcatttgactgaaccaaaccaccttactaggaggatggtacacatggcatagtttgctgacatttccatctcgagaaatggaatgaaatgtcaccgctcaaaggggaaatggttggtgtctagacatctctggctgctttcctcctcaaggctctggttcactgagagtgggtgtacgctctgtctctggaattattttcagaccagtgcctgggcatttgccaagaaggggaggagactgagaaacgacatagagaaggcctttcaggacaactgttctgagagcagaaacactactatatatctcagttacccttttctattaatcctgggcataggatatgcatcttggaggcagggggccacaacaggtatttattgagcacttgctatcagcttactctgccttcttgaggcttactcttgcgcaactctgccattgaataggtcagggaggtgagacaataagcaagcacctatgccaacaaacaaaacaatgaagcaaatcaagggatgtagtgagccgactgtacagactggaaggacctgtgggcttgatggagaaatgagctacacacaggaaaacaggaactgtgctactctgtaagctggaaactaggagctggtaagaaaagcagctggctgctctacaacctgggaccatccccacctcccagcttgcttcaggcatttggccaaagatgccttgaatcatgttttaaagttgttgagacaagcatccaaatgcctgctagcatagtacagtagatgtagtaggcaataatttataacatatttcacataactagaaaaatgtcaaagttcccaacgtgtggaaatgacatgtttcagaagcccaattatccaagctcaatcatgatatacggtgtgttccactattgaattatcatttgtaccctgtaaataagcacaaattttatgtcagtatgaaaagagccatggttaagagaaaaattttgtctggcaagatagctctgcagataaaggtgctttccactgaacccaatgatatgagttcaattcctgggaatccacatggtagatgaaaagacctgatgcctagcacattcaaattcatttacccctatttcccccaacaaatcaaaaatatagatgtaatagaagcatacaaaaagacttcacaattgataatattttttatttctgttgaatggcctgactctaagttttctggtaggtaaattagttgggaaataccatccctatttgacacagagggggagagaaattaaagtctgagatattaaattattggttcaaggtccagtgttatattaatttctccccgtggtaacaaaactcctgacaaaaaaacaatttaaggaaggaagaattgttttgggtagaacagtttaagggtagaacagtcatgatgactggcgaccctggcagctagtcacattgtatccagttaggaagcagagaatgatgatctctgtaccgacttccttttctcctcttccatcaactcaagaccacagcctgtggaacagtgctccccacatttaggataggactttacacctcagttaacacagtctagaaactcccttacggagacttgccatccggtcatctatatcctaactcgtgtaactatcagatagggagttgaacatagatcagagtctgaggtcattgcttccccaatagttctggcttgtagtctcactgggtcaagggaaactggaaagaattttagggggtgctgtatagtgacgaatttttgccagttgggtataatattggggataaggggtgtgtcctatgagtctggactgcatgccccagcctataatcttccctctatgtattttcctattttaatcctcatagattcatccctaaaccttggcctccaggcccctaggccgtcttttcttcctccaacccacactgcttaactgctgatagggccaaattccagcttcccactccttggaagcctcccaggtttgactcctttgagtagggctgagaattcagagcaagaaggggggtggtgtgtgcaccaaggagctgactgcatgaggttcctgcaccctccagccaaaccaactcggcagcttggcctatttttctaatactctacaatggagatttattgcttttgtattgctctcctcgggccttcaaagatttattggtttttaagtgacagaatcccagaattgcttaaaagatcaatcaaatggtgactggaatctaatattcagctctgacttgaacacactgaaccttcttcccccacgccccacctgtcacactgatgtatctgtggtaaccttcataagaaagtaacttggccatgaattaatcacccataatgcagtccctgcagtgagacgggggatgggggagtggggtgggtgtgcgaaaaaatctgtgggagacacttccccagccacagcagacattcttttgaggatcctttcctggtctcctctctcatccactcattctcctgcattgtcccctggtttgcagatcagccctggttggaaatactgctttaccagccccattctcctggccggctaggtgccctgcctcatgtgtctgtcaaaagcatctctgtctcaggtctgtcccccaaccaaactgctggagtggtccttgggatgcacaaattggatcaagttagcttccctgcttaaaattcttaaatgggtcactggttttctattgcattaagttcaagcttcttagcatgaaattcaaggcctgtcagcatctgcccttaaccttatttctcgtttcatttaaattcactctgcccctttacagggttttacacaacagtgacccatgtgattccttcctggttcatccctgagcttttcaatgtgtcatgaatacattatacatctgtaagctttctttgttttgagtttgtttgtttgtttgtttgttgttttattgttttagattcccttgtcttgaccctaagacacttgaagtcttggtgccaccaggccttcttaacttggaataacatctagccaatagtagatgccaaaaaacaaataaaaatacaagcatgaagcaagcaagcaaacaaacaaacaaacaaacaaacaaaatagcccaacacatagttaataaagcgtgtgattatttaattcagcatatttgtcatgccttccttgtggattccagatgctaaggccatgcattttgttagcttccttctgttcctaaacagaatagttatcagatagatcttcctctgacattaaagatgcccttctttgtgagctgtctggtcggatcgccgccgaccacacgtgactgtcaagcacttgatgcatccctgccataacagaggaaccagcttgttttatggtgctcacttttgatcagtgtgatatttcaacactggcacagcacacattgatcaaagccaacctctctctgtctaccctaggcatgcaacctctagctaccaccattctgcatggcttggggtctctataagagagaatatctggtctatgcctttttgtgtctggcttcctttgtttggcacacatttctccagtcccattcattctccttcaaatgacaggatttcatctttctttatggctgagtagctctccattgggtagatatactgcattttctttatccactcatcggctggtgggcatccaggctgattctgtatcatttctattggcaatgtgtgctggggtgggagagcacggtcatacagtggagctgtctgcgttttcttatgagtttcttttacttcatatccatgccacattatttttcattcgaatttgataacagccattctaaatagagtgagatgatacctccctatcatttgcatttacattccccttagtggctaatgatagcaagcattctaaaggcatttattggctatccattaggcttctttgggggatactgcagttagataagagcaaacaaggatggaaaagacaaaaagaggctatgagggtgggtgtgtagctaaggattctcatgagaggtatccagcacgagcctcctgggcatggaggctggagggcttcctggagggaatcctgcctaattgaggtgtatagaatgaaaggtatttaatgggagagagaggattgggagagagagcaatgcaggcaagagtccatacagagaaggcacatgggatgttctaagagccctaagtagtcagtgagcagggcaagaggtgaggcagaaagaggaggacagacagggactacagcaaggtctccctctgccctgggtttggactttgtcgtgagatgtaggagggatatttagtagatgcccacattttgtcctctgtgtgactggcttctgttaatgtcactatgcaggtatgccattaccttcccaacatccaaggtcagctgccacatcccagactgtcttgcccccatcctcagtacagaatgcaccatctctccagtgctgcctgccctctgccttcacccacttcctatcagggtgtggagtctgtgtcagtgactgtagctctttggggacaggagctaggtcagaacacaacctgagaccaatatgttctccccatcacatctgcctcccagttggacacaataggacagggaaggcttgtacaataagactcagctttactgctgggcgtggtggcacacacgcctttaatcccagggaggcagaggcaggcagatttctgagtgtgaggccagcctggtctacaaagtgagctccaggacagccagggctacacagagaaaccctgacttgaaaaaccaaaaggaaaaaaaaaaaaaaaaggactcagctttatccagcagtttcactgggtagctttgcgccaggtacctaattctgtgatccttgagttgtctgatagtaagtagaaacatatgtgtatatgatatcacacgtatcgcatacacatatacatacatacacatatgtatgtatgtatatgtgtatgactgttgaaggaggaaatgccccatcctactcccacctataggtggtcacaggcaagtttatcttctgcacctgcttcaagctgatgtccctaaactgcatgtgttctgaccctcaggtgaggttgataacaatgtaggtactctggcaacccagtaggctcaagaatctggtaggtgttacagcggcattctgggtacttctcatgggccatctacgagaaaagttagaacttgtaacctgttcttatggcgtctgtaggggtggagcagctccgtcctgtaggatcatccaacggtatacaagactgacactagaagtcagtgcatcttgccaatggcttccaaaggtcacagcaagttctatttactccctgatgagaatctctgggtctcacgcagttgacaggcacgtctagttagggccacacattctgaaacgcagggtgattagttgcagtgaaaattggagacccagccaacttttaaagaatgaagaaactttactgggggaaaaaaaacagaaaactattgccaaatttcctccaggattcctttaataacagcaaagcccggagtgagagcacacggaacaatcacagaagggttttgctggtccgtggagctacagcgagcaaaattggaatcattaccatctgattctcagacaccagcatatgattgtgtccaattaggaagaagaaatgaaaatttggaggatttattagcatggggcagcctgaggagtttgtaagtcccagttcacatggaggtagatgagagacagcaattacaatcattctctaagccgtgtttgttttgttcaggtccccccggttctcctggccacctttgctagggactaaatatgaggagttctgtgtgccctgatttgcagggagcatttggtagagatgagaggtatttcatataacctgtaagaagatttaactctgtaagtaactaacactgcttgtatctgtgcccaaaagcatgctgggaatgtatcacactggattagggaacatgagaagccagataaaagaagcagcagtggaaataagaaataagaggatgcatgctgttgtattttcttcccacagtctaactatggcactaaaggaatataccattttaattagagatatgtggaaccaccaaaggagatgggtcagtcctgtgtcgaaccaaagaacaacaggcagacagataattcagtcttattacaaaagcaaaaaagcagaaaggcaaagtatgtgaaactatggatatgttgatttcgctttgctatggtaatttctgtgcatctctccttatcttactatctatcgcccatctatagcagcgtacataacttggatatatgtactaaagtttatctctttaaggaaagaacaattttacaggaaaacaccaggggaaaaaaggcaacacttgaataatatagatggggtgcattcacttggtctcagcctagctacactgctgagttcccattataaacctgccctgccagcctctaccctcactctgctgcccagcaatccagcttaccaagaactggctctggtgttgggattttggattgtattactcagtctcaaaccaaggagggggaaaaaacaggtgtttggaggagagtattttaaatggagcagtcgatggaacacgaagagtgagcgtgttctattttgaactgtctgccatctggagagatggagactggggctgttgctgccaggatggagagaagagagtggttgccatgttcacctcctaccacaggggctatttaagctctaaacgtctgtggtgccggagaggcgtctgagcagaggtttgcacttggaaacttcagcatcactgtggtgtctgcaaatccagcaaagaggaggaccacattcaaggacagtgcagaggtgagtagcaggagagagttctgtgatgctgtaccaagggacagatcaaagaagggagaaggctaggcttgtgaagaagtagaaagaaacccgtgttagtatgattatagtataaccttatgaaacaggaaagttaaggaaactgattacaagaaaaaaaatggccaacatttttactttaacctctaatagaaaataagaaagaggactggagggatggctccgtggtaaagtaccaactgttcatgcaaagaactacattcagattaccagcatccatagcagacaggacacaactgagtgtaactccaaatccagagggatcagccacctctgtcatccacaggcatctgcactcacatgtacacacacacacacacagatgtacacatacaccatccatgggcacctgcactcacatgtacacacacccacacagatgtacacataccccatccatgggcacctgcactcacatgtacacacacacacacagatgtacacataccccatccatgggcacctgcactcacatgtacacacacacacacagatgtacacatacaccatccatgggcacctgcactcacatgtacacacacccacacagatgtacacataccccatctatgggcacctgcactcacatgtacacacccacacacagatgtacacatacaccatccgtgggcacctgcactcacatgtacacacccacacacagatgtacacatacaccatccgtgggcacctgcactcacatgtacacacacacacacacacacacacacacacacacacacacacagatgtacacatacatcatctatgggcacctgcactcaagtgcacacacccacacacagccatacacatacatataatgctttacaaatgaaaagaaaatttaagagctacataagttgatcaggaacaatagaaagttaactgaagtgctgtaacgggaaacatctgggcgaggcttgcttaaaactaatctgaaggtaagggcagaatgtgagctgctggtgcaactcttgcagagaaccagggttcccttcacagcacccacatttggcagctcacaattgcgtgtaccttcagctcctgcagattctataccctcttctggccacccacaagcacccacatgaaactgtacaaccacacacagaacccatgtgcatacacaccacaaaatataagtaaggatttcttaaaaatagaaaggcagatatgcatgtagaagagatgctgaggcctggcagatctcactgttgtcagagaatctttatacaaggcagagacctgataaaaggaaaaaaaaaaaaaagcagcagggaatgatggtctagggataagatgctggaaggtaggccataataacaaaacttcccatgggataactgcacaaagatgtgagatgtgaaagatgcgagatgtgtggtaatggattcaaggtgaagctcttacagtcagatatactgaggaacaatagactatggaaaggtgggagggctgtataagtggatatagttttatggtgtttccccacacagagtgggggtggactcatgaagccgctgtcagagtagcaaggactccaagatcccttctccacgttcccatctctccccaacttttattttctactagcttctatgtcttttactgctctcggccctaggacagtttgcacccctactgtctctcagattttgagcaactgataactggtgactcacagtatctctctgcagctgcccaaagtcagacattgaagtctgcctcacctagtatatttccatatcctcatctattggtgtttttttctgagctagcacatgtatttgtgcaaccatagtatccaaggaggcttgttcttctgaaaaacacacatgcacatgctctctctctctctctctctctctctctctctctctctctctccccccccccccccaatcagttccagctgcctggagctggtcagagagatcatattggagactctggatttttggtagggaaagaatagcagaaagcttacagtctgtgtggctcggaagaagaactggatgctccccttttccccttccccttcctctttcccctcccccnnnnnnnnnnnnnnnnnnnnnnnnnnnnnnnnnnnnnnnnnnnnnnnnnnnnnnnnnnnnnnnnnnnnnnnnnnnnnnnncctttcccctttcccctttcccctttcccttcccctttccccttccccttcccctttccttttctttctttcttttctttctctcttttttttttcttattttgagacagggtttctctgtgtagccttggctgtcctggaactcactctgtagaccaggctggactcgaactcataaatctgcctgcctctgcctcccaagtgctggggttaaaggcgtgcaccaccactgcatggccccctttccttttctaacctggctacagctgcttagggattgctgtttggctactgtgtttccacgagggtgtcaacttgggactacattttttttttaaagcttgcaaacctataaaaaaaagtacccattttgagactaggaagtaacagcccaaataagagaagaagaagggtttgagatcatggatttagacctgaattgtacaatgcagtagccacagtaggtggatatttaagttaaatatatgaacgaaaacattagtccattagtttcatcagccacatttacaggatctataggtagtgctggatattatattgaacattatttctatcatagtaaaaaaaaaaaatctcaccttgtgctgtgctggataaaaagaggccatggtttcaaattgtattgatgatacagatctttgaggatacagataaagtccagagagcctttcgtgagagatgaacaggataatgggtagagtgtattgctaggcataagacgtgaagttcctgaagaataatgagccctgcttttgggttacttgctgctgagaccctgacctactaagctggaccttccccctgcatagccccttcctagggataacgtataggttctaaacctgttctcaaatggttcttaacattaagcagtcctcaaaccatagattgtgactcctttgcgggggcatcccaataactctttcccaggggtcacatattagataggcctgcatatcaggtatttacaattcataacagtagcaaaattacacttatgaagtagcaacaaagtaattttatagttgggtcacagcattaggaaggttgagaaccactggtttagggcatggttaatttccatatggttcaaatttttgtaaaacagttattaggagagctagtccacttgcagattcttgactgtgtccagggatgaaaagatggggcccaagaaactgcctttagaatatgttcccaggtgatgctgatcctgatggtccacccttgcgaactagtgctttagccaataggtgacctaggtggagaaaggagcctatacagataatcaggtaggctctctatggtgctgatatttgcttgtggctatgctgcgagaagcagctgttttatattcttctgggataccaccctggctggttttgcagatttcagaaccccgtgtctcgatggcagtgtatttcagcattcagataacagtgttagctcctaagagctgatctagaatctgccagtgtgttcctctattcctgtctacatgggggcttaaaaacacacccctgttttctgatgatgatgacaatggctggtgtctgaaataattcatgttgtgttggcacatgctgatggtgaatcttaatatattgcgtctatgcagatgttggggcgtaggtagaagatggatgtgcggtgaagctgaacatcagaccccaaacaaatctgtattcttttgtagaaggctggagcagcctgagagagacaaatccatttctaactttcactctgtaaaaaaaaaaaaaaaagttctatattttctaagatcagacaaaatatatcgaatgccaacatgctgcggcggtatgggcgcgtcactcagctgggctggaatcggtatgcattgtccccctgggccagttttgattatgttcctttacctttcattgcagtcagcaaatctgaatttgctattgtgaggagagtaggaagacggaggggaaaaaaaaaccgaaggttttaaccttcagaaagttcagaggttcagtctgaataagcacaaaaactttcagcgcgcctctgaattccttgaattggcaaaactgttcagactcccaagagaactactgtgcaggcaggatttgggccttgctttgtggccagaagggagagatgaaattatgaggcacagagtcgggaaaagtgggaagaggaagagatgttggaaaggggtggggtaccagtccagagtcagtgttactctactgttctgttttttcatttctaagccatctgcttcacaccgctcacaggaaacgactcctctggcaggacaccctgttcctgcttaattgaatagatttcccaaggataattgtttaaaactatttccagtggttgtaaagtcatggaaggagtggaaaagattgggatacagatgtatacacatgggccaggttcaaagacaatgcatggtctgtgacaagcacatatgccccccccccaaccagtgagctctctttggcctccacagcatacaagtggctctgttaaaattggcactgtctccccatcagggacctgtggagctgtgagtgtgagaggaaacaatcacttccattcaggtttggagcaatgtgtttcccaggcttaattataccacaggtatataaattacagaaacatgttaatgctcccatgattaaaattatagagtgcctaattgaaaaagcataaactgaattgaagaattcctaattatagtttgctttgaggtgttaatttcctccataacgaatgcataatttcttggaacctaaaagggcggcctctgcgttggcacctaggcttcagaaagatgaggaagggctgtctgtcattgttcatagtgggaagttcacttgggaagctgggttgaggtccagactccagggcatccttgttaagcagcttgagagggatagtatgggagcaggaccttaatctaaggctctgtctggtaagatcaaagcagatgaggagccttaggttgagaaatgtttctctatccccaaagtctttatcttgttccctgttggttttggttaagtctgtgcctatatgtcttgatctagatttctcagcattacatggggattcattaaaaatcaaatgtttgagggttcagggagatgcttcaattggtaaagtgcttgttgcacaagcatgaggacttgagttcacatcccagcacccacataaaaagacagatgtgatgacacactctggaaaccccagtgctgtgtaggctgagatgggagaaaccctggatttgctgacaattcaatccaatctagaagctccaagtttcattagagtatgactgaaagacagacagaagactgacagacaagaaagaaacaaagacagacaggaagaaaggaaggaaggaaggaaggaagggagagagggagggaggaaaagagagggagagggagagggagagggagagggagagggagagggagagagaggaaggaaggaaggaaggaaggaaggaaggaaggaagacaaatatggcaaagggagacatctggtgttgactgttgactcttcaggcatgtgcacacatgtacacattcacctgtacacatgcacatatacccatgtgcatacacacacacacacacacacacacacacacacacacacacactgaagtgtttaagcccctctcaaaacctattgaatcagaaatcctgaagttgaatctggaatttagcaagacttccaaaaattctataatgtacaccaaaatttgagatccagaatttaggagtgagtcacagacacacagacacacctagctgcatctttttgtatacttgctctgggcaggagcgatggttggcaatgccctggacatccttccattttaccattataatcatgctgcaaagtagaaaaagaagccacctaccttatctctttaggcaatgcccattagacacttgaggggcttttatgggaccacacaggtttcaatgtgctgtcttgagagtttctcaatgctgtcacacaatttacatcagtatctttactgattagttgaggaatgtgccataactgagaagaaaaaaattgcaaacgctgaatctgactatgcgtagggaagactcctaaatgcctgttcccttggctatcagcagcttcaggtgtgctgatgcgttctgtctgaacagaagcatgaaggtgaagtacaagtgtcacagctcaaaaagaagcttcacgtttggggttaaaaacaaaatctttgtattctgcgagccaaacagcagtaaaacatccctaaagactctggagtgcagggaacttagcttagagagcacaacgtagacatgctaactctccttgctctatcaggattctgtttctctctctctctctctctctctctctctctctctctctctctctctctctctctctctctgtgtgtgtgtgtgtgtgtgtgtgtatgtgagaaagagagagagagagactttcaccaatgtgtaggcatttgaaataataaatttatatagctgctttataagattctttcaggtgtttgcataatttttagccattctcatagagttgaaattttgggtcatttccagttatttgttattataaagaactcaactataatggatttattcatgtttttcttttgttattgtacctttaaatagaaaaaatagtctccaggagtggaattactaagatgaataaaatgaaagagtatggtacaatatgtctattctcatacgcaggtactgacagtcagttagatccattaaccttttcattctttaatttaaaatctcaaactaataaatatacatagttagaaaatcaaatagcgaaaccctttcctgccccatgatttacaacccctcccttttctgccccaggggtgactgtatttcaggttttagctatttcttccaggaattggtgtatttctacacaatgctctattttaaggttattgattaaagatattatctgtttacttcctgttttgatagatgaaaattcacctgtcctaaaccatgtaatacgtctctctcttctatccacccagtagaattatcccctacatatttttaaaatataaccacatatataatagctaattttacaattccatcaaagcaggtttcttcagagccaagtggtatactatttttaatatagcatcatgtaatttacttaaagcttactaagtgccaggaggtaagtcatttacatatgttaacttacttagttaattcttatcataactctgtcaaataagacctgggaggaggttggagaagtggttcagctggaaaaaaagaaaaaacaaacaaacaaaaccttgccttgcaagtcaggggaaggaacttctaatacctggtatcatgtatgagctctgtgggctggatgaccagcctatagtggagcaaacaggaaggggagagggcgagttccccagatcagtctcaaactgtgagctctgggctcagtgagagatacccttttaatctaaagatggagattgatcaccaagactcagtgtcaaccttgggcctttatatgctcatacacacttgtgcatacatgcacacacacacacacacacacacacacacacacacagatggggggcggtgggggaaagatgtgtacatatacaggaagaactggaacacctcccctttattttacagttgttgcggtggagtctgaactatagaaaggttaattaatgtatcctagactgcacagctgctgaaaaacttaataacctgtctctacacttgacagccttcacttcaccactgcgttacactgccccttaccgcccttccagtcttgtgtagagggaatttttgtttctctaactcaacatgagctgtacgattatctgttatctttggtagtatctaactaaactagtcagacattatttttctgcccacagagactccccatttcagtgtgttcaatactagccaataagaatgtagccccagaagcgatagatgaatgcctgtctttaaaaaggccatttagttatatattctaggaaaataaggaccatgaaatttcaatctgtgtataatttcactcaaatttcatttaaagaggcgtttgttgtgtcctgatactttcgctcattcttgtttataccacgcagcctctggggatagtgttttgatttgggagaggcacgaatccagtaagctgagtagctgatactgaaggaaaggcggggaaagttgacaggcagcaagcagtctggtttggaagtgcaggcatccaacttctcaaattgtggagtctcctcctgtgtcctgcctaaagggacagacactgggctccccacaccacagcgtggggacctcactttcaatattgactccttactcctcccgttcttttccttgtggatttatgttttccattggtcactctcattttaatgggaggtaagcagaatatgctaaaccttccactttgaaatagaagctccctttcgttatctaactcactgctcccagtagtaactgatggggacattgctgtcatcagtttttacaaatgacaccactaagaaggccacacagtaaccaaggttcagagtcaaagttcaaattcaatgcacgtgccaaagtgtacatgctctttttactcctaggtaataaaaccacttatgaaacttgaaagccattgacagatttcttttctcccaatttgatgaattatggaacaaagatacaatcacagatctatggaaaggttgttgtaatttacatattaattttgttaatttaatgcgttcacatgggaacatactgttttgcatttcttggctcattggtaacatgtatattttcttatatatttatattattgacattttcttgacttttcatggcaatggttatactccactgttcctttaataatttctgacaataggatgagactttttattttgactggaggttcaggtataatctagtcaattaatgaggaattaattaataacttatatagagagcaaggctcccaaacacaagactatcctgcccaaaatggcaaagtgccaatgatgaaaagtttttaattatgggtgttttgatagtgttttaaaattaaaatatattattctgtcagatacacttgttcctttcgagttgaaaattctttaaacttttaaaaatcagtaaaagattcccaaaaacattctgctcatctgaagatgggttttctttgtcaatatttactttaagaatggatgcattttaatttatagaaaagtaaatctaaacgaagccaaatgtgacaatatatcctgtaggacacagcactccgtagcaactttgaaccaataagacagaaagtaatggtcaacccattacatattagtatcaatgaaatgtttttagtttcaaagcattaaggctagggggtggacagtttcatatttttcaaatcttttaaatgtctgacttgatggagcataactggattcttctatgtacttctgcatttaattaacctttaattgtttgggttgaaacaaatcaagaaaatgcaacatcagtgttgaagttaggccctggttcatcattccagccccacactctcggaaataagactcgaacttaaaatatatttacaaataccttggctatacagctaggttcttctctgatcagatataacctaaaatatcctgtttattctagcttagattctgccatgtgactggttaccggcatctgtctccttcctgattctgcccagaatcccttctctcccctagatgtcccacttctatttcctgcttaagccataggccataggctatgcatccatataatacacaagatgttctccctataattcccccttttagtccaacaaaaggctccttttctttcaaatataaattgaatacaaagatagcatttatgaaacaactatgaaaactctaaggtatgatatttagcaacttagacaaagtattctattgtctaaagtattctattggtgagttcagagttctgtatctaaattattttccatcctaacttgtattattaacctaaaaacatctccttagacctgggacatcatcttaaaacctaagcttatataagactatgactatctagtcttcaattcaatcagagacctgagtatacaggaagtgcaaggatgcatcttccaaaatttatagaaatgacagagacagctgattgtctggacagtccccaatattatctctataacattggaacatctatcatagccttcaggtccagaatatctgacagaccttttgtgaatcaggaagtatgaaggagttgcttaccctgtttggcagagcttggcagtcaacttccctgcatctgtttgtcctttctggacaacattttgtctgcagatgaagttagagcattttctttgcccactggctagattgccacaattgaaacaactccatatggaggttattcatattcaccatcttctttgaagtggaatgggggtactgccaagggcatccatgtctcacgtcagacacacacataattcgaaacaaaagaagtgttttaatagccactaggataattggctttttgcttttgttgtttgtggtggtggtggtgtgtgtgtgtgtgggggggggaagtagttggtattacattcaactctggtagtttcctaacatttagttgcaaagcaactaattttttttgttttggtgctatattttcaaatgtatctcactcagttatacttaaatatgcctacctgtcatacactttgaatgagcctttagtcctcaaatgattatctaacattatacagtagtcagagttataaaaatctcccaaatgctgtgatatgcctcatcatagcatatcaaattgcatatttgctatcgccaccaatctcatgtagggaccagggactttcaagttcacagtgacagatacaagttttccaaattctaattttcacttgaaagctcaattatgtcttgataaccaatgctgtccattttccttaaagtgacaggtagacttcatttattttggagaaaatgttgatcatgtattccagcgtgaatggttgtaacttgtcaatcactcttccaaggaaataaatggaacctgagtgagttcattgagtctaggagtttgagtccagccagagctgtatgttgaaatcacatctcaaaataagtaaaataactaattagtaattaattttaaaataccccaagaaaaaatatggctattttgatatgcatggcaaccacagaactatttctcgtaacagaccataaggtcagaaggcagaaggtgtaatttatgcacatactacccattgtctcatgggaatattagttaatacacactcaaggatttgtacttaacaatatgaatacttctgctaccccatccaagacttgtagaatacaggataggaagggttaggtgccagtgtcttggcacatgcttaagccacaattactattactctctgtgtgttaacacaaagaaagacttgtactattagtgttgttcttatgtttgccaagcaaaacccacagttgggtctctactaaaagagaatttgtttggaaataaagaaaactagcatttctacctggaacatgcatgtgaggcctctgtgactagcaagtgatgccactcactagattaactgatcttaaaggattaagtaaaagtagtcttaaagtacttagtgctgttttattgcattgggtctaagaggcctttccctggagaaaggtctatggcaaattttgttgtattttttcctttcaaatctcttttagtggaatgttaagatgactctactttgcacaacaattccagtgttacaaaatcgctaagggggttctcagaggtcctcagggtcagggtatattatggaagtccatctgaggaactgctaaggtaaattcacaaaagacatttctggaatttggtgtatatgtaaataacttggtgaggttcttactgcctatgttcctccaccacactctcagagagccacagtgatattccagaacccacaaactttgctgcacttggctgtcggcctgacacctaccactctctaagtgaatggaatctccatagcactgcattcctgtggacacctcccgcactgcagttcctttaggaaacctgttttaattggtggtataattcttctctagcatttatttgccccatctggctctactaaaccagctactgtgattaatttaatgcttaattagtaattgttacttttaccccatagagctttgcagaaccctttttttttttttttttttgataattgattttagaaggtcttttttaaaagacatacttagaggagtctcacctcacaattttccttttccaaagtgtctgagttgcaagaagagacatcccagacattctattgataattcttaaaaactatccctgtagatggcttccaaagagcatcaccatggcttttgatcacaatatctggagccagaatccctatcgtattggaacttaccttgttcaccattttgttttttctttgctcttcttactacacaaggtgactgtagaaaacaaagatgtttctggagcaagcatggcaggaggttgaagcggtcacttcccatgatatctgaataaaaaagcaatgctgggagacctggcgagtagtaagcagcaacacaaaactaaatgtttattaaagagaactgaaattcagaaaggaacctttgcccctccaggaagagttttgtttcacttgcatcttttcagagtttaatgtacaaatgaattgatctgagattgactacaatagttcggtgttcagtaaaactggcatagggtctgacgtgttgaatctcggcatatccctaggcaaggaggatgctgcaggaccacggacaccaaccgacaatgccctcggcattctgcctcatctagctgttggcagttaacactgcattgaacaaactttattaagtctgcataaactttccttaagtttgagactaacgcacacccaacattagggaataggaccatgaggtcaggtagggacctgataacattggtacatactaaatagtatcgccaactaaggtgcaaataagtatacagtcatacactctaccactaaaatatagaaatgttccattcattaaaaaatgtggcactgtatgttttaatggtgtttccatgtttctaactaccttaacttctcatctaatactgaaatagttcgtggaatgttatcattttacttctaatgaaagttgttcatttgatataccacaatttaaaatattggttttactctatctacttacctaatatatctatatatacctacctacctaatatatctatctgtttttctatctatgtttttattgaaatagaattatatcatcttactctttcgctttcctctttccagctcctcccagtcacctactcacaagaccctctcattgatagctttttttcttgattattattgttatatatatttaatatgtatgtgcattgtgcacaaagatataaaaataaaacctgctaagtctgctttcattgtgtatttgtgtgtgtgtgtgtttgtgtgtgtgtgtgtgtgtgtaatttcaaggctaacatctctgcattagataaacaataagggacccatccctggggagattaattctttcttccagtagtcattagttgcctgtggttgtttgtctagaggagagacactgcaaaaatatccaaatatccctcttctacattaacatgtccattgatgttaccaaaaatattaaactctttataagtgtggcccttctattatagtgttggatatcaccataaccgttcttttaaatgtattttgggttacccaaatagcatattatcttcatatcatttattacacatctcttccagacctgctgacatgtaataatgcaatattgactctgtgtatgtgtgtatgagcttgtgtgtgtgtgtgtgtgtgtgtgtgttatatgtgtatctctgcatgaatgtgtgattgtatgtctggtaagtgctgatctgtgtatgggtgtatgcttatgtatatatttatatatggttatttatgtgagtatgtatatatatgtgggcatacatttatacccaatggtatttatttcctgtactattctattgaatttgatccttagcatgcactcatcttaattatagctttactaaacattttaacatcttgccttcctaatgattcgtattcagaagatattagtagctattttaacccatttaactttccatgtgaattttaaaaatcacttaatcacattctgtacacaatcctcaagtgaattggcttaacttgtagtaaacctgtttcttaatcagaaattattatatgagcatttccatactgaaagagggcatgcatattccagtctttattctttctcaagaaaactcagatcctatcacacattcccattcccatgcacagctattttgttaaaattgttactagcatcaggttcatccttttctcatggccatttcccccattaaatttgctaactacnnnnnnnnnnnnnnnnnnnnnnnnnnnnnnnnnnnnnnnnnnnnnnnnnnnnnnnnnnnnnnnnnnnnnnnnnnnnnnnnnnnnnnnnnnnnnnnnnnnnnnnnnnnnnnnnnnnnnnnnnnnnnnnnnnnnnnnnnnnnnnnnnnnnnnnnnnnnnnnnnnnnnnnnnnnnnnnnnnnnnnnnnnnnnnnnnnnnnnnnnnnnnnnnnnnnnnnnnnnnnnnnnnnnnnnnnnnnnnnnnnnnnnnnnnnnnnnnnnnnnnnnnnnnnnnnnnnnnnnnnnnnnnnnnnnnnnnnnnnnnnnnnnnnnnnnnnnnnnnnnnnnnnnnnnnnnnnnnnnnnnnnnnnnnnnnnnnnnnnnnnnnnnnnnnnnnnnnnnnnnnnnnnnnnnnnnnnnnnnnnnnnnnnnnnnnnnnnnnnnnnnnnnnnnnnnnnnnnnnnnnnnnnnnnnnnnnnnnnnnnnnnnnnnnnnnnnnnnnnnnnnnnnnnnnnnnnnnggccccccccccccacgaggggggggggggggggaggcccgagggagccccctccctcccccctccctccctctctcttctgctttgtgtaattgtgtatagagctgggatttatcggttcctgaaagactgaaaggactcattggaggagccatctggctctagtgctgtttactctcgtttcttttttatagaatgcttaattaatttttgtcattgtgttttgtttagtaacacaggcttttcagatgccaaaatcaggcttagtccctaccccacaaacactgaacacccattgttctatttctaaactgcataaagttacggtttaaaattcctatttgatatgagaattactttgggaagttcttttcccccagttggaagtttttattggcttatcattttaccttaataatttctcattctatcccattatataaagagaatacagccagcatctttacttactgagatgatatttgtgtgtgtgtgtgtgtgtgtgtgtgtgtgtgtgtgtgtgtgtgttcttactttcttcccttctgtaatcttgcaagtattaacgtatttcccctctgctgtatgttgaggcatagcttctcatagtttgattgactttgggtgcttcaagtgtgcatgtccataagcatgctgtatgggttgttatattgctgtgcttagaaggactttcacagccaggtttggcagcgtagacctgtaatttcagcacttagggaacggatgcacgtgcacccagagtggctgtacttgggagatggttactttgtagacagtgtttgacccacaagtatgaggacctgaattgagtccccatcactgacatagaaaagcagtgtatgcacagctttgccttcacattcaacactggggaggtagaattagtatggtccctggagtatgcttattgccaaactagccaaagccctgagctccaggctcagtgagtgaccctgtcccacaaactaaagtagagagtgattgaggaagataccagattggacctctgatctctgccctatccccaaataaacacaggtgaagtatacgcacacacatacacactcacaaatgcacacgtgcacgcacagatgcaacctcaaaactgcctccacccaagaccatcgtttcctttgatttcaaccctgtaaggatggtcgtgtctacatccatatccacaggtttaccactgaagaacactttactctgtttacttgctttcttgcctcaagtggatgttgaaatgtttgagggcgagctgaagcaatcatgacacttgaaagccttcagtgtgtgtaccttgaagggaaaggccagtctcttatatgtgccatacggtcatcagactcaggaaattttaacatgacatcacctggcatcgtctatagtacatatccagacttcctcagttaatgtcctctaaattttaaaaattttaatttgggacccaatcaagcactacacgtcatattttgttggcatggatattgtggcatttttttaaataagcaaattataaacaattagaatataatgttgtttcacatatgtggtaaggtctgaagtttggcggagttttggaatcataattatggaaatttcaccaatttgtttcttgatgcatttttgttgtttcttgctaattggtggtgtttatatttccatacataacactcctttctctctctctgtctctgtctctctttatcctcctctccccccaccacgtgtgagtgtgcatgtgtgtgtcacatatacacttttcaattttacttgaacccatattccaacacccatggtttaattgttgtggcaccatcttacattttaataagtagttttccatcatcatccaacaccaccccctttaataaagaaaaaaaagttttgaactatatgtgttatttttaagaaacagcaaatttattggaattgccaaattaggatcatctatatcattagggctcaggctctctggcccatgttttatctgtttgttggtttgttttgccaagggaagtgatggtgtcaatttgggtgtcaatcaccagctccatggcatgtgatgcctcaccacacactttcgtatttctgcctatttcttcatctttgcttcatcaccattatttaacacccactctgcctagccccaggctagtggttgaagttattattttatatcatcttgtagaaagcacttttcactaaagttagccttatgtatttcttgtcttatttgcagctgggtttagtggaccttctgctgtaaaagttttcccatccctttctctctaccattttctatggtgtgtagttcatttaccttcaccttaaattaaactattttttgggttctttttactaactttagaagtctttgagctgatgtactttaatagattagattattgttatattatctatagatgacagtggactgacttctttcctaagatgttgacctcctgtcttgtgtcttgttgtacttgtcaaaattatcccattttacaggcaagtgaagtgagttactcagtatatcagacacagtaaggggcagagcggaaagtaaaaattccatcttgttttagttcagtttctctttggaataggtagcttaactaccaacccaaatgcaccactccatccacttgcatcttccccaaaagaaaattgacatttgctatgcttaccacacatttctaaaaagaaaaaatatatatttgtacaatttgtacagttctattttattaaaaataaaatgtgtacaatatattttgatcaatgtttccattcccatcccaacttattgcaaatcctcttcacttccccaactccaagccttttctttagaaaagaagcagacaaacaagcaaacaaataaaaatcagaagacaaagaaagaaaaagcacaacacacacacacacacacacaccaacaccatgaaaacacaaaaagaaaccataatatatgagcaaaggaccagtaagacaaaaattgcccagagccatatgaaggaaaaggtctctaaaaattactatggagtgtttattttctgtgggccaactactactgcaaatggagcctacctttaagtgtgattaatatagccaatgagaatccattggagaaaaccttttttatcctttgcaagctgatggggcctccactgaaacttgactcttctcctaccctatatccatttcctgaggagtcttctgaaccttggtgcagacccagttttcctccttcatgtgggcctctctgtcctcccttctagcttattctcattcctctgtatcagtccctaacacctagaaacaccttctacccaggactctctgtggccacaccaggctagacctcaagaagataagtcacactatcctccctctcctcccttatatcgatccactctcaccttcagccctgtaagaacttgcttgcagctgcccagccattcactgaagactctaaattgtggtacagacctagagccccccatagcccttttatccctgtctctccagattattatttattttatgtcatgtgttttgcatgcacgtgtatatgtgcaccatgagtgtatctagtactgtggaactagaagagggcatcattggtccatcttaacctgggcttatagatggttgtgcattgctgccaagtgggtgctgggaacccaactgagacatctgggagaacagcaaatgttcctaactactgagccatctctgtagactgttagaatactttcttatgccaccttaacctcccagatgtgctagatcattatgggaatgatagacaaaaatgttaagcagggaattctaatacgtttttgtttgggattactgggtgatgtgctaatcaagtaaagctttgccagcaggaaggaatgagtaaggtttcatatttctaaaggaagaaagggagcaaaggctttgacataggagcatgcctatgggatcctagaaatagctcagactagtgcatttagagacccaaaaagaaaaagggggaggaggttaacagtgagccttgtagatactctagaaacactgcctttcactctaaggtgtcaggtagagaggagtttcagtgggagggaagaatgtgcagtcatgaggttggcatgtttctgatgagtctggatagacactgtcttgagaataaattctcaggggcacagatggaagtagagagaagagaaattgctataactggatccaaagataccaggggttagtttggagatgtggctgtagagatgggggaagatggtggggctgggtatatactgatagaaaacaacagggttgcttatggagtggatacggttgcaaaggacagagtaactgtacttgaaggaggatcatgagagctgtgactgtaccttctacatctgagctatgctgttcagtaagaattatcatatattgtctacatatcagagatggatgaagagtctcaggtctcattcaaaaagcaggacaatgtacctgaactctcagttgaatagttactgtttctctaaaattttatggtaattttttcttcctctatattaatataaaaattcactttcgttaagttcatcaatgtaacccaatcacaggtgaagggttctctctgttgtctagttcagttgcaggctaatcacaagctcaccagtggtaagtagctccagccctccatagggattctctagaaaacattttctagacctgttatcctgtgtagtctttgcagagcacagaagacttcctcttctcagaatccttccctggcaggtttccccttcctaccctcactcatcctgttgaaaacagttttagtgtttgtttatgccatcttgattctgagtccccagtaccaggagccaggttgctctcaaatttctagctgatatactatgactaattaataagtatgtgataaatatgtatataaaagacagacagatgggacagtttctcacaggcctagtcaggaaccaatagaagatgccactcccaaccccccattgagatagacactctccccaattccccaatgtctcctcagtactgtttcgactaggcaaatagagactaaaacccagaatttacagagtcttgaaataaaggttggctaactaagacatattgtaaatttcagctctgtagttccaagtgacctttaatgtggggaatgaaattgcaagggtagattctgttggggattaaagaactcaacttgtttcttagcccatcttgttcagtagcacaaatcatttatcacagcattttttagctttaaaccttgtgcattagttgcaggcaaagcatggaccttagaaggaagaaagaccactagaaattattcattccattttttttctcccttaacagccttatggtggtctactttataatccataaaatttacccatttaaagtgtacaatctcaatgatttccagtgaatggataatgttgggtagccatcaccccaaaatatcttcaaatatatccatctgatcataagaccccttgtgcccatatgcagttgattcttgtccccattctcagtccaaaacaatcacccatctgatttcagtccctataaatattgtcttttcttcacgtttcctatgactagaatcagacatacacatcttgtgggtcaggcttctcttattcaatatagtgcttctgagcttgttctgtgtagactatatcacagtgattatgttgttgctattgctataaataacattccattcaatggctatatgtacctcacatactgtttgtccacttgctagccaatgggcttgtagattgttttgtattgtcacatcatttcaaacagttacattgttttttggttttgtgtgtgtgtgtgtgtgtgtgtgtgtgtgtgtgtgtgtgtgtgtgtgtgtgttcttacacgtcttcatttcccatggatggatttccagggttggagtgtctagataactggtagtttaatgttgacatttaaaggacttccagacttttgttccccaaatggtgtaccatgtaataaggtcccatcttttcaatccttgctagcaattgtctgtcctttgaccaatgacattctagtgagcgaatgaagtagcttatcctcattatcttgatttataaacctccttatgtgattaatgatgttgatcacctcttcattcacttattagtcattaatatttcaagtatatgcatttttcagtgtgctgttcatcttcttatagaatagtaatggatcattacatgtattggacatatgtctttatgcatatgagttagaaatattttctctaaaaccatgacttgtgctttaacttgtacaatagtattttaatcccattttttaaaaagtaatcgaatcataatagtttatcttctttccgcaataacaggccattgctttggtaatacatttatatattattcccccagtctgaggtcaggaagattttctctctaatcctgtaagtttcattgtattagttcatccatttagttttataatccattttcggttagttcttgtgggcagtgtaaatttagatttttgcaagtggatattcaattggcctagcctcatttgctgaaaaggctgtcttattactgttgaattgtctttgtcaggaatcaatggatcctaaatgtggaatttatttcagaactttcaattctcttttattgatctatatgtctatccttctgccagcatctaatggtattgattttcataatttacaaattcagaaactgtaagctctgcagtattgttctgagttttttctaattgttttgcctattgaggccattacattcatgtatatatgtgtgtgtgtgtgtgtgtgtgtgtgtgtgtgtgtgtatgcatatatatcacatactaggtttgcaaagtctctgatgattctcgtattactcggttttctatttctgtgacaaaatactggagataaacaattcaaaggaggaagatttattgtggctcacagttttaagtatatcattccctcatcatgtggcactgttgcttctgtgcctctggaagcagaaggcagatggcaagggacatgtcctgagctaaagacacagaaggcagaaagagcagggaagggctgaggacaagacatttccttccaggccacaacctgagcattgtacatcttccgctaggcctcaagttcctaccacccctaataacccagtcaggttacttatctcacagtataccagtctgctaataatggcagaattctcctgatccactatccttcccaaagtctcacccctgaacttcactgggacatgggcctttaataaatgagcctctggggaaatcccagatatgaagggtgaaattatgctagtggttacattgaatattcagatatatttggaaagaattgtaattttaacaatatggactatttaatacatgaacatggaatctatttgcctatatattctttaattttttcacttttaaatatctaaatatttcacatattttgttaatacttagtattgtgatattatgagtagtaatgtttggttaattttattttcagaatgcttttcttcagtgatgaaattatcatctatttttattttattttatactgcagctgaatattttaattttgttgaagtcatttagtagttttaggtggtatatgtatgtgtataaaacccttttaattctctgcatataaaatcctaacatcttcaaacaaagcatattccttcttgctttctatccttggtgctacaaattaattaagataattactagttaaatttgccccattctgaaaactaaattctccattctactgttgaccagacttctttagaagaaaagcgttcaatcttttgcccttgagtgtgatactaactttacatgtttcagaggtgacatttatcaagttgaaaaatctctttctatccccttttcctttctgtggtatttttatcataaatatgtattatattttatcatttttctgcaactgttgagatgattatgggatttctgacctttattctgttaatgtgctatactgcattcattaaagctccaatattaaaccaactggcactgctgagataaatttcattaagctacaagataaaatcctttttatatagtagtgggttctgtttaccaatatttggttatatattcatcagcagtaatactgctgccattgtctcttattgtaatatttctctgggcttgtattagggcccagtcacaggagttgtgtttctatggtaggttactttggactgtgattttggttggattcagaagtagctgtaagattaaggaagcatgcctcagagtgcaccaaatggggatgtgtccagggaggattcattgaggaggccttcctagaatgtgaaggcattatgctataggctgctacaggaattctctctctttgcttcctggtctccatgatgtgagcttctctgttccacccatgccctcccagccacggtagtctgacacttcccaaatcatggctgaaagaattaagcatatgttcctaaactgcttctctcaagatttgtcacaatagcaaaagtcagagtaatgaaaattcatccactcttctatcttttttacatagggcttgtgcaaatttgaactactgttctttacatattcctggatatagttgccctatggcctgctggtctcctactcttgccaacatgtcttctgtacctgcttcactttaacacacccagctttcaagggctggttacttatcaagcaaaaactcgagatgcttgaacacatgcactgtggcagttgatctgatgactgaagcggctattggatgcctagtggcagttggctaccatacatagagtggatacattcgataaagagaacgtgcatgtcagaggcaaaatggatagggatggtgtagtttaagtatgctacctaggatgctgtacagttaaaatgtatggattctttatttctagaagtttccatttttagatgaaagttgatcatgggtaactgagatctttaacagcaaaaccatgaataagagaagctagcatatgtgaaatccaatgacgctggctgcaagatgaatgtctataacgacctcccactgttgattttcagtactaagtttgttcatgcaggacacaaaaaaagaagctaaaagattcaccagcatttccctaaataattgtgtttcagtaattggctaggagaaatccattctctctttcacttttcaagacttatatgacagtattgcatttttctgaactaaaataattgttttaaaatccaaagtgtttggcatgattaggcaaacatttttattgtgagtgaaagccacgactaaaactgaggcttctggaatcagactgcattctcatcttagctcaaaaactcaaacggcaccatctgtgtgagacattgaacatttcatgctttagttttctgattttatcaaatggaaatgatgatatctacctgacaaaatttctatgaaggtcaaatgagataataaccagaatttacacatgcacgaattagtaagtgctcaataaatattttctgtagatgaagcgatcttttcagcatgaggtgctgagagcttggaaaagaatgttgatccagccaagaaaagagaaactcactctcattcaccagttaaaggaagttccccagaaagagtgacgtttagtctgggctttcttgattggatgagtaattttcagcatgcagaaggggcagggggaacctgtgggaagatgggaataacatattgaaacttgtgtgagaagcaaaatgagatggcattcaccagtaatctcagatctcagggagctgctcctgagggaccatgagttgtgggccactctggggtatatagtgtaattctctaaaagaaagaaaggagggaacagcaggtgaaggaagagaggcagagcaaaaacaagaattgtttttaaaatcactttccaattttaaatttcatcatgtaaatgtatttatttttatttgttttctcagaacaggtcttatgcatcctaggctggcctcgaacctgctaggtagccaagggttgacttgatttgacccacctgtctcagcctctcaagtacctggattgcaggtgtgagtctccaaacctaaacatttatttcttttacaaatacttggctaccaagttttacgttatcagggtattaaaagggatgaagaagaggcctcaaacatcagaggctcacagtctccatagttgcaggagccaaggctttaagcaaattatagacaagggcttcaattgtgataaaaagctgtagagaaaataaaacaagacaatgaaccgagatgtgatgtgcaaagactggtagttgtgaattgtatgttagtgaacttggaatgtaccaccttggtagtttgtgattgtgattgctagaaggatgtcctcctgctgggttaataaatggtaaatgctggaatcacctgggtcttatatagtatatggtcacttcatggctatatactgaaagctaagatgatattgatgctgagatcctgttcttacagattctggttcagtttgcctggggtggggccaaggaataaccttttcaggcccgtaggttgattatgttgtgacaccatactacaggtcttatgcaactgatatactactgagctgaaaggcccttttgaagtctaagatgacttttccttgctatttcttgaagcttcaatggtggagaaaacaaactgacttttgatggctaccatgtgattccatgatatggtactggaaacaaaagctgttgaataatactgtggtggtttgattatgcttggcccagggagtggcacttagaaggtgtggctttgagaatctcctcctagctgcctgaggatcctgcaatttctcctgtttacctttggagcaaaatgtagaactcttagctcctccagcgccatgcctgccggcctgcttggacaccaccatacttcccaccatgacgataatggacttaaccttagaacgtgtaagccagccccaaataaatgttgccctttttaagagttgctctgatcatggtgtctcttcaaagcattggaaaccctaagacaaataccttgccagactagtactctgatttcatccatgtcccagtgtcacaaatctccaggtgtatagattttccttattttttaaatatatatatattaaaaacaagatgcataaaactagaactggataaagtagatttatttcggaatgaactgatcagcgtgagaagtaaactagtcatatcattctcatttttagaaaagatataagatatacctgcaaaaccgtttgccagtccttgcctagagaaagatgatggctcggtggcaggtcatctccactgtctccattctctgtttcacagatgactttgtattcaagtccagattcaaggcagatttcagaggctagttggccaacctttatataggactttgtcttggcaaaatcaagtggagaaatattgacaaagacatttgatgtcaaattctgacctctacatacatgcaaatatatgtacatgtgcaatgtacatgaataatatatatgcaagccacacacagacacacacacacacacacacattgggaaatggcctcttgctatgtatacaaatgctaaattctgaaccctaacatctggttgccctccagatggctgcatcctcccatacattttgttgtgtaaaccttgctccccaatttaaaactattggttaataaaaggctaaagcttgtgactgggcaatagagagagaaaggcatgacctgacaatcaagaggggagtctccagagagaccatgggagagaaggagaaaaagaagagagagaagagaaaggacgcaggtaggggggaggacaccatgaaagaagatagaccaggagcatgtgtatggagaagtgccctctgaggatagactcatggagcagaaataacctgagcaagactgaaacagcaaataacaagggacatatggctgggatgtaagttagaatagctcatgacctgctcagtctatgactacagcttgtaagtaaaataccaggcttttatacagggtagctagaataaagatttaattaacacattcattcatacatacagacagacagacagacacacacacacacacacacacacacacacacacacacacacacacgatagacagagagaggaatgaaaggaggaatacaagtttctctctttaaatcttactgatgcatacctgtaagtccagcacttgagtggtagatgtaagaggatcaggaggttaaagtaatccttagctacgtacttagcttaagaccagctcaaactacagaaaaccctgcctcaaaaaaagactgtggaaggaaggatggaaagaggtaaataagggaagggaagggaagggaagggaagggaagggaagggaagggaagggaagggaagggaagggaagggaagggaagggaagggaagggaagggaagggaagggagaagggaagaagagtaaattataacaccaccattgtccaggctccaggctgtttttctcagtattgaatcactgtttcatttacaccatgtggatgctgtttaaaagtaccctgtagggcacactgctgttccctgtagatctgtcatgcccccgttcctatgttgtgccagtcttccaggtgctgtgtgcattgatgtaatgattctcaggtgtgacctgctttgaagggctgttattaggcacctagggactcattgtctgacccacataaatagttggaaaagcctgagaatgcccagatctgaaaacagaatgcatctgaaggttcaaagactttggcttgagattttgagatattgggctgggaccagtatttcaggatttcacctgttaacatgcccccaattggctcacccacttttctctcctgtttctctcctttaccattttatcttggaaccatttctgtaacacgccatttgacttggaatatgtccctggagtatgaatatgagctaacacgtgtctttttctgggagaacgcagaccaaattatgcacctgcctaaagttgggcaacgttcacctgggaactgaagcctactttccatctgttagctgaatcaacatctcggatgagtattacatctgcctgtaggcatctgccccatgtacagaaaagaggcactaggatttttaataatagaaagttgactacgtctcatcagaggaatcgggtgagagaagtgaggcactattcaaactctttgctttggcgtcagagacagcaggatgatcaagaggctgtatttcccaagcttctgggggaatgctgtaggttctgcatggaaggaaggttttggaacctggcacagagtggaatgcccttgcctccaatgggaggaggtgctaaagcagaaaatgcacactctcactgatgtcatagcagctactttataattaagatggagttgggacacagcatagtcttcggagccctcatggggagaactcccaggcaagctatacaaagacaacaccataaatgcccaccttctcattgggagagacagaagccagcatagttaggaaactgcatgactaaatgcaccttgaactactttaaattcttcttctcttaagacaccagaattttcatattaaaatgtgcctactccaacagccctgcatagttcatcacaaccacttcttctccaaggttgaagatagaactttgaggtagatcattctcatttacgtatacgtttatcattaccagagaagttaaagcactgtgctattgacagatgtatttttaggagaacagtgagaaccgttactataggaaagggaagccctcgccatgctcccattcctctcccccaccacttcccttctctatgcagtcaccgtgatgccctttctgcaccttttgttgagaggatgctggatgcacgggcagacagattcatctgacggaaaggcttctgggtttctggtgacacttgcagtttatgtctgaatagataagctgcagatgtggtgggcctgtgggaactgctgaatttgctccaacgcagtaatcccattcatatgtgtaccatatgttgactacatagcttaacttccaaaatgccctcattccctccctctttgtgatttcacatgagctgggatacaaactaagcagtttaggccaccaatgttaaaaaaaaataatgctcaggtgtccctttgtgctttaccttggtttatgggaaaagaacatttcttttaaaaaggaactgaactgtgaagggggtgtgagctgcttttgctgaattgccactcacagatcagtgaacctctcaggtttatcctcatcccttcaacctgattatcacagatctgctttgtcaactcaaccaaacctaacagccagatgagggatgatgaggctaagcctgtgtagttggctgtactttcttccaacagccttgatcaactgaatatccaaaactcagcaatgacctgttttcttagttcatcacagctacactcttggggcaattatgggcagtccatgacgccagccctggactaatcttgatccaaaccatcgcaggatggtaaaggataatagaaagtggttctaagaggaaggtctatctcctgaagatctccaaaggtttgggggtctcaagtgaataaccaaggatgatgaagggattcaatttaggataaaaagattgactaagaaaccaagacaaaggtattatcttgtggacattgtttaaaaagagagagagagaagaatgaccaagacaatggttttatcttatggacatgattagaaacagagaagatgaagaacagactggatcttagagaacagggacccacagctcttttcaagtcctataggagtgagttagttggatacagatcaggataggaagattgactagaaggcatgttacctaaatccagtatacagtattgttagattctattgctaggctcagaagggaacctgggagactgtaaacttcctgttcttcttcccttaatgatcagagccccttgactaaaggaccctccattaatcaagctgtcactagcactcttaacagatgcaaagctttgcttaaagctgttgttacaggaagagcaatgtgagtcttggtgattttttgcattcacccctctactgttcacattttctaggttcaggtcttaggtttttgtgctgtttgaaagtgactaagtttacctgataaacatgagggatttttcattcaagaaagactctagagataaggagtttgagtcatcattcatgctttcagctgtctttatgaacataaaggctctcatacacacagtcatgtggcactcttgtcccactatgcatgctcagatgttactcacccacagttgtttttgtgttactttatttttattaattatccattaatatgggtatgcatgctatgtgatggggtttcagaggacagctcgatggaatcaattttctccttccatattcacataagttccagagttcaagtcagcaggcatcgtagcaaatgtccttatcccctgagtcatcttatcagctctgggcatcacttgcatcgtgaaacattcaggggctccaggctctcatttggatatcgtgatgctcagctgcagcacatgcttcctataacactggccatatctacccctgtaccactcatgtacactctggattctccttcaaaggtgtacataagacaacacataagacatgcacatgtccaccaaagcttcttgtccatccaaggatagcacacacccatatgcattccccttttattcactcaaatgatcattcctgtgtcctgagaaaatcaaggaatatttgcctcatcaacgatgctacatgttcttgggaggaagcttttgggaggagttccttcaaagcctctgttcaccttagtgctatcatcctggcctctggatcttatcatgctttgtaatccagtgtccttggatggataagctaaccagagggctgaggcctatgctactcggctttcatcaagtttatggcatgttatgatttaaaaatggacctaacatcacaattgccttactaattaacatactttttacactctttgggcacttggacttctgtcttcgatcatgcatctcagagtggaattgaatccttccagatgatgttcaagagaaggacagatcatttcaagggatacggactttttatccaattcacaaacttttgagtaactttcacaaaggaaatcatacacttggcatatggttgatattcaataaaggctgtcatctctgtgcacacgctggcacttcttcatatgcttagttgaaggggatgatatgagattacttggcaggcactcctgggaatcactgtttaccctgattaaagattctgaacccatccagatttggcttcatgcttgctttcaactttaattcaatccacttttattcatttcaacaaatatgcattgatcacttgcttagagtcaggcatgctcctgggcactgtatgtttgtgatgggggaggggtaaagtgattcagagataactacaccacaatctcacttctgttaaggatacaatcgagccaggcatgtgtcccatcttacacttttgcaaaatcaactaggcagtgatgaatgtgttgggaataatttattctggacagatctatacaggcttcatggattaaatataagaaagacataggtattataggcagaggtggttagcattggtgggtgtttcaagtagaagaagcgcaagctgatgagagtcagccataaggacatttatataatagctaggtgtctggagctgttgaaattagtgatcattatgacacgatcaccgaaaagcaagctggaatccaagcacagaaggtttcagcagcctatatcatgtaatttggacaaaagaaaaactataaaagtgcctgaagagagatcgtgttatatgattggaagcaaaatagatagacagaatgattagatgaactaggagcaaagaaaccagatgagtctagatgggaaagggcctgacatgagcattagcaatggcaagaaggaaattgtggtaggtttaacactgctgagtccgggaccacagagcttgttggttgtggcagagtgagatctaagtaggtgaaacctgagaatgagccagattcaggatctaggcaccagtcagatggtggtcctattcttcataatagttataagggacatcccacctgtaaggagcatcaggtttatatagatttggggctgagtttgggtgtcttgtgtgaactggcattgggattttccctgtctagagttctaatacctatcagtgcctggatgcaggaggaagacattttagttcaccttatgaattgttccccttatcacagccctgaaaataggtttgtagaaaaataggtttctacaaagtaatgaatgggtttaaaagtctgaaaagagaataaggatttttttttcagacacaagtgataccagtgtctccttccagcggaattatatgcatacaatgaatgataatgagcatatatgtacacagagtgactcatctgcctctctgcttttttgtccagtgtttaccagctggttgtcaaggaggagcgactccagaagtctcggagagcagctgacatcattgagtgtttctcagtacctgtgagctaccggaacgcctccaacctcgattcgctacactactttgctgctgagctgaagccctccaacctgcctgtcacccagccatttacagtgggagacaacaagacctacaatggctactggaaccctcctctctccccattgaagagctacagcatctacttccaggccctcagcaaagcaaatggagtaagtaggtcattgcttggacttttcccttctcaagtgcaaatcttttacagcagagttttataaactgaggtccatgagccaaatccagtcctcaggggttttgaggtttggaaataaggtttgtttgtgtttgctttctttttattattttgttcagtttttagctttcatttggttttattttactgccactattcctcttggtttgtatattactgctggctgctttgatgtttaagaataaagttggggagttataatatagaagctatatgtcatgaggcctaaaagctcttatttctatgacttctatggagaatttttgtaaatttgtattagagtatgggaaaggtactacacttgagaaaaatcacatggcctgcattgtgattcctgtgtctgtagttctgatgcctatcagtgcccggatacaaggaagatattttagttcactgtatgaattgttccccttatcacagcccagaatcacattcaaaaacttatttttttaatcttagaaaaaaaacaaagaaactgtttatgtcaaatactccgctatttccttggtttagtagttgtatccatcaacatcacacattgacaaggctggaaaaattcacaaaggccatccatcaccttcccattcatgctcacccaccctaatacaacattctttggttactattaccacattaagtcaaagtttttcagtgtttatttttgaatgcctttaatgacagagaacttactttgctgatgcaaggggtagcaatatggggattgatgctctaaggacactttgcaatgtaattatttaatatatctttggtggtagcttcttcccagtggtcttcaattattctttttaggggtttgtcttagggttttactgccatgaacagacaccatgaccaaggcaagtcttataaaaaacaacatttaattggggctggctttcaggttcagaggttcagtccattatcatcaaggtgggagcatggcagcatccaggcaggcatggcgcaggaggagctgagagttctatgtcttcatccaaaggctgcgagtggaagactgacttccaggcaactagggtgaggatcttatacccacacccacagtgacacacccattccaaccagaccacaccttcagctggtgccactccctggtccaaggatatacaaaccaccacggggtttatagaaccaacacaataccctttaaggtattagtttctattgcatgcaatctttaccaccatccacttacactctcttaagtgacacccattggatcatcttatctgataatacttcatataagttactattttccttttcagggggccttcatttaacatattccagcttccataatttattcatcaagcatataatgaccactatcgtgtccacattcctgtggtttatattgtgtttagtaggagcccttcaagagagtgtagatctgtgaggaagcctgaagcatgctgcatcatgcagcgtccctacagaagtttcatgctcaaagcaaacaagctctgagaccaaagcaagatcggtggcatgtgtatagaatagttcagtctgtcagtgccaatcaatgcctgggaaaaaaccctggaccgtggaactaattaacatttagagtgtctacatgcccatttaagttcctctttgatatttcagttctgcatttattacttgttcaagcaacactcctcactgagagtataaagctacaaagagaggctgccagactgccttccacctgtccatctggtctccactctgtgcaaagcactctgatgtgttgagcatgaagacataaacatggaccaaagcatctgggggcccttcttgctttcagatctctgaatcccatgctggcctgtgcagggctttagcacagctctctgataagatgtggttctctctactctcagcacatagggatggatatggttatatttccagtctgctaatgaggatgagagcctatgccccagtcttaagtttccacatcctcacacagatacttctcagggagctagctacacatcaagacttctggagactaattatcccaggtgtttttctaacccaagaattataggatttgaaaggaatgtcaggtgatatggaacatccaatccaatggatgattttcttcccaaagattatagcagagccctttctctggaagatgcagggttttgacacataggaaaagcaagtcaagtgttcacgctgcatttgcctttgaggcagtttgaagaggaacaaagccatgaactacctgtaccttccaccccacatcatctgttctaccattgtggaattataatttccagcaaagataaacagcatgaagagtattgggcacatgcttatgcaaggttgtctgagggtgcaattgttctcacaaaaacagaaaaaggaaaagcagttagatgtgggcactcagaatgaggttttctggcaaagagaagggtacacatcacttaaaattactgtctttagtattaagttgtactggaaaaaaaatgagcacaaaggtcataggatcagagcagctattcctactctaatctcgtctggcacctaccctattctatgtatcatgggggtcaggagggctctggagaatgatcagccacatgctccaacctaccatattcactgttcttgaggagatacatcaggaaggatgctccttgctacacagcaccatctccatgccctgcttcccataaatcattcaaagaacaattgaatgagcaatgaatcaaaacaaagagaccaagactagagaagaatagaataaaagacccacaatgagcaggaaactaattagacattgcattaatgctaagtaatcattccaaaaccactttacaaaacagaaagttaatgtaaaaaaaacaattacttaaagaggaggcacacaatgtaaaaattaacaattgtgacctgggcccaaaattcactctcatatcagcaagaaactaggaatggactggagactgaagtttgtgaaccaaaattcctaattttctcctgcaagacaagagcaaataagtaaccatcattttactcgagacactgggaatctttgaagtatacttcctaaacacatgcgtagccatctaataacagaaaataaaatattaacaatatacaaagaatcacaaggaagacaaaggatatgacagagaaacataaaaatcagcaacttgaatggaagaagaaaacattaggcttggtgtgcaaagataaaatagtgttattcagtcataaaatgagacaatggctttggtaaaatggaaaatagaatccagtgaaatgcatcattgcaaagtttaatgccaaagatgcttcacagcccattgagaccaaagcaaattgggagagaagggtggatagtcatgtgtaagaaaatgggtatggaccagattgaaaactaccagtcaatatcattccctgcccccaatcctaaagggtggatagtcatgtgtaagaaaatgggtatggaccagattgaaaactaccagtcaatatcattccctgcccccaatcctatcagcaagctttattcaggacaagctgagagaatttagaatccaggaatcttcatttattttttattttgtgaatattagatcggcttatccacttagcgggtaaattcagtctttaaaatcagactgcctgcatacaaaataccggtggctgtgtgactttaattaatccattaaaaacattagatacagttgatcaattaaaagaacagctatcaaacacacactatctgtcacaaaggcaaaaaaaaaatctggaaaactacagtgagcagacagaactttttgtctgcataatacttgcattctggtggggaagaaaccacagtaaatagggaaatgatgaagtattgtagtcgtgtgtacttattaagtgctgactctatagcatgaaggtaaagacagtttgaaagttttatagtgattatgagtagtgtgttttcccaaccccatgaatgccatagaaaatttgaactttgcattcacaacaagatttttagagtctcttcaggtgtttgtatgtagtttgagttatctactggtacttaagttgaaattttcgcctaattagtgatcttgtgtttgccctttggtgttctttgcagacagcaaagcagcccagtaggtgaagcgctgcccttggtgctggagaggagtcagtgcctacagttagaagtcagtccatattgtaaccgtatgtttggaatagagctctataatggcattttagagttggatagaatttcaagtgtcatataatctagaccaaaagaagaagagaggaaagaaatatctaatgaaacattctcagtagggtatccccaagattactgcaattctatggagtgaaagttagtggattccttatggggcaggtaaaatgattagaacttttttcttacataacagccagttatttcctcctacttctcagctcctagtcactttgattgccttgagaaagaccaatctttttctatcaaactttcagaggaggtaatgtgtagtacccactacccacttggccagctacccactttccttggtgtgtcacatacagctcctctgatccctaggtctcttttatcatgcattttggttttgtaatgctagactttctttcaacaacttcttaaaaagaggctttcccaaccagtgcagtctcaattacattttaactatttctatcttgaatgtttcctaagaacctatcaaatatttcaagatggttttgccctttaaagtcttgacacaatactctatctctcttttactgactgttgaactaaatagttctagattttaggcttttttttttcaatgtcctgtcttctaggaattgttctgaatgcacctagaagcccatactaatagtacctggttagcatcttattttcttttataataccagatatttaaaaattacatatatttttgtatactgcatgcttttttccattttacttaaagcactcagagtgaggaaccctgtctcagattttgtggctattactgctgctgtttctctttgattcatttgttctcatgttttgggatgttgtttgaaatttttgtgctgtatttcccagactatgtttaatcttaaacctagagtagacactcaaagtcatttaattaacggattaattgatatagtatgaattactcctttatgtatgtgagtctccgtttccgcatttatgagttgaattattaattcatccttaattcttatttcattggatacataaaaatatcttgatgataaaagccatgtaacgttatgtcactagagtctgaatttccatttgctctaaagtgaaagttgtggttctaagccatttagtcatggacagatgaaccctaaaggaatttgctcccactctggtagttagactttctacccagatgtctcctttcccaagctccacaaacctggacagccttgatttccttcagccccttactaagaacacccagtgtagctatctcagtgataaacagcaggtggggaccattttacattgttttcccccactgttctcagaatgagtgctgctgaatctatgattctctgcatccccaccaccattatccatgattgtgaagttgaaaggaccataattaagggttggatgcaaaacaaatgtgacaaattcatgcaaatatctattagaagccatgttgggttgggtgatgctggtatgcttgttgtttacttaaagagaaaactctttccttgccttttcctttccaccatggggggtggggtacatttaacctgaatgacatctctacagaatgctgctgagctaaataagaaaagcaggaggcaggagagtggatgttctctctctctcttttctctcttccagctcttgaactcaattgcctcttgagaacagtgggaaggcaggtgctatgttgaatggatcaccgtgtttgtggtataagcactttataatagtagggatcactgatgtagggctgggttagagggaaaatgtatgcctccaaatgaattgagagactgcacatagttctacccaagcaatgtgaaaagaatgtttgcatgtccttgtgttttctgagccttggtggggtagaaggcactgagttttgaacattaggcagacttggctttgaattatggctctttttaactatctaaagatatgttgtatggttgatgatctacatttcgaaactttggtggagagaaaatggtacaaggtacatttaagtcatcatgtagcatcacgggtgtcatgtttattcttttcccttttgctgtttcttctttcctgaggcaggagcacaggtgggtagaacatcttcctctatctagtgtatcccagtctgtctggtagcctccacctagaagcatcccttcttaactctaaataacccctggactcttgtttacatccagctgtttctctggactaacacatggcctgttccaggcttcagtcttattttatcttctcatttttattcatagtttccagcctgatatcaaactcagtaatttattacagtttattttattgtctgttagttttatgcctcatattctgatccttagttgttaattatcaaaatgtcatataggaaatcagagatggaccgtggtatgagcaagacccaagttcaagtaggttagagttgagaccacacagatgccgacatggcagtcagttgaatgctctgttagggtgtttatatatcaattcctatgttagttaaggtaaactaatttttctagaatatggaacaacaaaatctcaggggattatcagaaaatataggtcacatttctccttcttatccaaaatgaaccagcaggaggacagagaaatggctcaggagccaggagcactagctccccaggactcagtgtcaaccctaacattcacatgattagttacagacatgtgtaactccagttacagggcaccagataccctcgtcttacttccatgggcattattcacatgtgttagccatatactcatgcaagcaaacatttgtatgcaaaaaaataaaaacaaatacaatttctaaaatggattagcagaaaggatctgaatctcaccggcactcatggtctcaggctggtaagtggtctattctaatatagtcttcaagctagagaaagagaaatgtgatggacaggcatcacctctagaagtttctacacaaaatgacacactgcactttagaaaatcagttggctaatcacatgatcacagttaacttcaaaaagaatgatccagtgtctattggcatgtgccttgaaggagaactggaatgtgtgatattatccgtggtgactcctatatatccctataatgactaagctatgcccacaaatcctcatatagccaggcccaggatctatgtactcttgtagtgcatctgttcagtttctctgataaatactcagtgagagctttccatcatcaagcacctaccatgcctcagacatgaaataagttgatcgtacctctgtgtgtcctcactggatctcacaaagtggctctatgttgatgtatggaaggaaagaaggaagggagggagggagggagggagggagggaaggaagagaggaggaaaggaagaaagggagggaggaaaggaaggaaggaaggaaggaaggaaggaagaaaggaaggaaggactgccacaatgttcccctggaatcctacctttaatgactgcatcctataaagaaatcttggtttcagttttccccccactcttcttggagatggggctagggatgcctattcttacagtgcactgttcaactctgaaaaggagtcttccactgttgtcatctaatcccactgggaaccttcaggaaacctttgatggtctgccccacccatcagtggctgagaagccaagaaatagaaagaagcctgggcctgctgagcctctagtaatacttttgcgggcatgttaccatattccaatatcaggaacatatttctgttttttatcaactctgtggcagccctttggaagttaaacaggcaccaaccatttggaacataggttgatagcagaacactgaaaatcatcagtctgatacagggccctctctggcacacgtctgtttccagagtctgtgcttcccagtttgcctgccaaagctttcttctagatctgaatagattctgtttactggggctccccctaccttctcaggcatttctacctccaaggctcctttctgtcctttgagctttatcacatgctcttaagaactctcaacttctgttactgcccttctgggagctccaacatctctcctcaggtaagaagaaaattccctgagtgtcaccttgtacaaataccaagatgagttctcccaggttgctaatttattttcacattcacttacagttcctacagattttattatcatgaggcctgagggagtatgagctttttctttcccatgcaaatatactttaaattcatttggaggaggagatgaaggttacccaaatgttgacagctgataatcttgtcagctgtgcctctgggcttcagtgctcagacccatcatccaatctgtcttaaggaaattgcagtcaaagcttccatgaggtaaggtctatacttccattgggttctacaaaggaggagaattgggaaacctggtctagctgtccctttaattaatgcaatagtagaaaaaagctttgggcttggaaaaaaaatgaattcctgcctttaagaacttggttgtatcatttgttatatacataagtgagaatttaaatggcaaagctgggtcttctcatctgtcaactggaataagatgcactccttgactcattggggtttatgaaggaagtaatcaatagtaataattctttgcgaatgctcaaggatctttaaaatcaagatacagatacaatttgaaactataaatattcagtatatgtgtggttgtgtggattcagcatatatccatataaaattaacattttaaggctagcaaaatagttcagtggctaatggtgcctgccaccaagtctgataaactgagtacaattcccaagatacacaaaattttaaaaaattgagaataaataattagatattttacttaattgttcaaagcaacagataagtggtattattcatgtttgtgtttattctttgagaattgtgtacagtaaatttttatcattttttcctcttcccaactcctcccaagtcttgcccctcctggtatatatgcatacacacatatataaatgggcatatatatattcacaatcttagaaactttaagttatattaagaatcttataacagaagaaagaaaatcattgagccctaagtctagtgtaaggagtaatgaatcgtctttaccacttaagttcatgggaagccagggcaatgagccttctgtggtgggctcacacagttctttttatatgatagaagcaagcatgcatgcttttcataaaatatattaaggaggatttttccatatatacctacataaagacctggaggaagagacactggatggcatcataagactttttttttttttttttttttttgcttgcttgctttttccttcctttttttttctcaaacactcaattagtttttttctatatcaattctatgaagtctgaggttacagtattagaatttaatggagccatttgcactcaaagattctgtttcttgctctataaaatggcattcattctactaattaatgctattaaataagattaatggatttctaggtttgtctcttttcagaatttttgatgaatattctgagcatgggcttgcatagatggcctgcaactggctatgtgaccttaggaaatgacatatacactccggttgtcttgtgtagaaactattgccgttcctggtatcagctcaaagagaatgtttgtagatcttaaacagcatccatgaagaatactgttggtgccctggcatgcatggcttactgccagatgtcatcatttggctgccatagatgtcatgtgagagacagaagggagaggtgctctaacacaaaaccatacaaaaatctgtgggacatttcagttttaaaactcaccaatcaaatttgaatagactgtgggcatgatgagagtattcaggaaaaataaacaaaaccaagcagggcccaggatgtgcaaagatatcctggggacatcagactcaagaataggaaaaaagatgggcgattacaaatgaaagatggtttactgtgtttagagaataatggggcctggggacaaatcttttgcaggcccttctagagactgaacattttataacatggctttcacctttgcaaactcaaaatttaatttattaggtcacaaagtaaaaagattgaaacgaagcaaacctgtaagaagttaacaacagataagcggggccttttgtgtttgtttattcttggagaattgtatataataaatttttattcgatcttcgggctctagacaaccgggccaccttcctggtgagagcacaggggtccgcccgacccgagaggtttctgcctcaggccccggcggcgggagcctccttggctccgggactctgctgagggcaggctgcacgggtgagggtgtggaatacagaggccagccgtatctgggacagacgagagccacagagcttctgaggcggcgccatctttggctccagacaaccgggccaccttcctggccaaagcaacacagttcctgggaaagatcctgttttgggccttcatcttcagccaggaggaggtccaaacaccagataactctgcaccttccctgaaagaagagagcttgcctgcagagactgctctgaccactgaaactcagaggagagagctagtctcccacatctgctgatagagggtaacaaaaataaaaagaggaacaatctctaaacaaagacaactataacaactaactccagagattgccagatggcgaaaggtaaacgtaagaatcctactaacagaaaccaggaccactcaccatcatcagaacccagaacgcccactttgcccaggccagggcatcctaacacacctgaaaaggtagacctggatttaaaagcatatctcgtgatgatggtagaggacataaagaaggaatttaataactcacttaaagaaatacaggagaacactgctaaagagttacaagtccttaaagaaaaacaggaaaacacaaccaaacaggtagaagtccttatagaaaaacaggaaaactcatccaaacagatgatgggaataaacaaaaccatactagacctaaaaggggaagtagacacaatgaagaaaacccaaagtgaggcaacgctggagatagaaaccctaggaaagaaatctggaaccatagatgccagcatcagcaacagaatacaaaagatggaagagagaatctcaggtgcagaagattccatagagaacatcggcacaacaatcaaagaaaatggaaaatgcaaaaagatcctannnnnnnnnnnnnnnnnnnnnnnnnnnnnnnnnnnnnnnnnnnnnnnnnnnnnnnnnnnnnnnnnnnnnnnnnnnnnnnnnnnnnnnnnnnnnnnnnnnnnnnnnnnnnnnnnnnnnnnnnnnnnnnnnnnnnnnnnnnnnnnnnnnnnnnnnnnnnnnnnnnnnnnnnnnnnnnnnnnnnnnnnnnnnnnnnnnnnnnnnnnnnnnnnnnnnnnnnnnnnnnnnnnnnnnnnnnnnnnnnnnnnnnnnnnnnnnnnnnnnnnnnnnnnnnnnnnnnnnnnnnnnnnnnnnnnnnnnnnnnnnnnnnnnnnnnnnnnnnnnnnnnnnnnnnnnnnnnnnnnnnnnnnnnnnnnnnnnnnnnnnnnnnnnnnnnnnnnnnnnnnnnnnnnnnnnnnnnnnnnnnnnnnnnnnnnnnnnnnnnnnnnnnnnnnnnnnnnnnnnnnnnnnnnnnnnnnnnnnnnnnnnnnnnnnnnnnnnnnnnnnnnnnnnnnnnnnnnnnnnnnnnnnnnnnnnnnnnnnnnnnnnnnnnnnnnnnnnnnnnnnnnnnnnnnnnnnnnnnnnnnnnnnnnnnnnnnnnnnnnnnnnnnnnnnnnnnnnnnnnnnnnnnnnnnnnnnnnnnnnnnnnnnnnnnnnnnnnnnnnnnnnnnnnnnnnnnnnnnnnnnnnnnnnnnnnnnnnnnnnnnnnnnnnnnnnnnnnnnnnnnnnnnnnnnnnnnnnnnnnnnnnnnnnnnnnnnnnnnnnnnnnnnnnnnnnnnnnnnnnnnnnnnnnnnnnnnnnnnnnnnnnnnnnnnnnnnnnnnnnnnnnnnnnnnnnnnnnnnnnnnnnnnnnnnnnnnnnnnnnnnnnnnnnnnnnnnnnnnnnnnnnnnnnnnnnnnnnnnnnnnnnnnnnnnnnnnnnnnnnnnnnnnnnnnnnnnnnnnnnnnnnnnnnnnnnnnnnnnnnnnnnnnnnnnnnnnnnnnnnnnnnnnnnnnnnnnnnnnnnnnnnnnnnnnnnnnnnnnnnnnnnnnnnnnnnnnnnnnnnnnnnnnnnnnnnnnnnnnnnnnnnnnnnnnnnnnnnnnnnnnnnnnnnnnnnnnnnnnnnnnnnnnnnnnnnnnnnnnnnnnnnnnnnnnnnnnnnnnnnnnnnnnnnnnnnnnnnnnnnnnnnnnnnnnnnnnnnnnnnnnnnnnnnnnnnnnnnnnnnnnnnnnnnnnnnnnnnnnnnnnnnnnnnnnnnnnnnnnnnnnnnnnnnnnnnnnnnnnnnnnnnnnnnnnnnnnnnnnnnnnnnnnnnnnnnnnnnnnnnnnnnnnnnnnnnnnnnnnnnnnnnnnnnnnnnnnnnnnnnnnnnnnnnnnnnnnnnnnnnnnnnnnnnnnnnnnnnnnnnnnnnnnnnnnnnnnnnnnnnnnnnnnnnnnnnnnnnnnnnnnnnnnnnnnnnnnnnnnnnnnnnnnnnnnnnnnnnnnnnnnnnnnnnnnnnnnnnnnnnnnnnnnnnnnnnnnnnnnnnnnnnnnnnnnnnnnnnnnnnnnnnnnnnnnnnnnnnnnnnnnnnnnnnnnnnnnnnnnnnnnnnnnnnnnnnnnnnnnnnnnnnnnnnnnnnnnnnnnnnnnnnnnnnnnnnnnnnnnnnnnnnnnnnnnnnnnnnnnnnnnnnnnnnnnnnnnnnnnnnnnnnnnnnnnnnnnnnnnnnnnnnnnnnnnnnnnnnnnnnnnnnnnnnnnnnnnnnnnnnnnnnnnnnnnnnnnnnnnnnnnnnnnnnnnnnnnnnnnnnnnnnnnnnnnnnnnnnnnnnnnnnnnnnnnnnnnnnnnnnnnnnnnnnnnnnnnnnnnnnnnnnnnnnnnnnnnnnnnnnnnnnnnnnnnnnnnnnnnnnnnnnnnnnnnnnnnnnnnnnnnnnnnnnnnnnnnnnnnnnnnnnnnnnnnnnnnnnnnnnnnnnnnnnnnnnnnnnnnnnnnnnnnnnnnnnnnnnnnnnnnnnnnnnnnnnnnnnnnnnnnnnnnnnnnnnnnnnnnnnnnnnnnnnnnnnnnnnnnnnnnnnnnnnnnnnnnnnnnnnnnnnnnnnnnnnnnnnnnnnnnnnnnnnnnnnnnnnnnnnnnnnnnnnnnnnnnnnnnnnnnnnnnnnnnnnnnnnnnnnnnnnnnnnnnnnnnnnnnnnnnnnnnnnnnnnnnnnnnnnnnnnnnnnnnnnnnnnnnnnnnnnnnnnnnnnnnnnnnnnnnnnnnnnnnnnnnnnnnnnnnnnnnnnnnnnnnnnnnnnnnnnnnnnnnnnnnnnnnnnnnnnnnnnnnnnnnnnnnnnnnnnnnnnnnnnnnnnnnnnnnnnnnnnnnnnnnnnnnnnnnnnnnnnnnnnnnnnnnnnnnnnnnnnnnnnnnnnnnnnnnnnnnnnnnnnnnnnnnnnnnnnnnnnnnnnnnnnnnnnnnnnnnnnnnnnnnnnnnnnnnnnnnnnnnnnnnnnnnnnnnnnnnnnnnnnnnnnnnnnnnnnnnnnnnnnnnnnnnnnnnnnnnnnnnnnnnnnnnnnnnnnnnnnnnnnnnnnnnnnnnnnnnnnnnnnnnnnnnnnnnnnnnnnnnnnnnnnnnnnnnnnnnnnnnnnnnnnnnnnnnnnnnnnnnnnnnnnnnnnnnnnnnnnnnnnnnnnnnnnnnnnnnnnnnnnnnnnnnnnnnnnnnnnnnnnnnnnnnnnnnnnnnnnnnnnnnnnnnnnnnnnnnnnnnnnnnnnnnnnnnnnnnnnnnnnnnnnnnnnnnnnnnnnnnnnnnnnnnnnnnnnnnnnnnnnnnnnnnnnnnnnnnnnnnnnnnnnnnnnnnnnnnnnnnnnnnnnnnnnnnnnnnnnnnnnnnnnnnnnnnnnnnnnnnnnnnnnnnnnnnnnnnnnnnnnnnnnnnnnnnnnnnnnnnnnnnnnnnnnnnnnnnnnnnnnnnnnnnnnnnnnnnnnnnnnnnnnnnnnnnnnnnnnnnnnnnnnnnnnnnnnnnnnnnnnnnnnnnnnnnnnnnnnnnnnnnnnnnnnnnnnnnnnnnnnnnnnnnnnnnnnnnnnnnnnnnnnnnnnnnnnnnnnnnnnnnnnnnnnnnnnnnnnnnnnnnnnnnnnnnnnnnnnnnnnnnnnnnnnnnnnnnnnnnnnnnnnnnnnnnnnnnnnnnnnnnnnnnnnnnnnnnnnnnnnnnnnnnnnnnnnnnnnnnnnnnnnnnnnnnnnnnnnnnnnnnnnnnnnnnnnnnnnnnnnnnnnnnnnnnnnnnnnnnnnnnnnnnnnnnnnnnnnnnnnnnnnnnnnnnnnnnnnnnnnnnnnnnnnnnnnnnnnnnnnnnnnnnnnnnnnnnnnnnnnnnnnnnnnnnnnnnnnnnnnnnnnnnnnnnnnnnnnnnnnnnnnnnnnnnnnnnnnnnnnnnnnnnnnnnnnnnnnnnnnnnnnnnnnnnnnnnnnnnnnnnnnnnnnnnnnnnnnnnnnnnnnnnnnnnnnnnnnnnnnnnnnnnnnnnnnnnnnnnnnnnnnnnnnnnnnnnnnnnnnnnnnnnnnnnnnnnnnnnnnnnnnnnnnnnnnnnnnnnnnnnnnnnnnnnnnnnnnnnnnnnnnnnnnnnnnnnnnnnnnnnnnnnnnnnnnnnnnnnnnnnnnnnnnnnnnnnnnnnnnnnnnnnnnnnnnnnnnnnnnnnnnnnnnnnnnnnnnnnnnnnnnnnnnnnnnnnnnnnnnnnnnnnnnnnnnnnnnnnnnnnnnnnnnnnnnnnnnnnnnnnnnnnnnnnnnnnnnnnnnnnnnnnnnnnnnnnnnnnnnnnnnnnnnnnnnnnnnnnnnnnnnnnnnnnnnnnnnnnnnnnnnnnnnnnnnnnnnnnnnnnnnnnnnnnnnnnnnnnnnnnnnnnnnnnnnnnnnnnnnnnnnnnnnnnnnnnnnnnnnnnnnnnnnnnnnnnnnnnnnnnnnnnnnnnnnnnnnnnnnnnnnnnnnnnnnnnnnnnnnnnnnnnnnnnnnnnnnnnnnnnnnnnnnnnnnnnnnnnnnnnnnnnnnnnnnnnnnnnnnnnnnnnnnnnnnnnnnnnnnnnnnnnnnnnnnnnnnnnnnnnnnnnnnnnnnnnnnnnnnnnnnnnnnnnnnnnnnnnnnnnnnnnnnnnnnnnnnnnnnnnnnnnnnnnnnnnnnnnnnnnnnnnnnnnnnnnnnnnnnnnnnnnnnnnnnnnnnnnnnnnnnnnnnnnnnnnnnnnnnnnnnnnnnnnnnnnnnnnnnnnnnnnnnnnnnnnnnnnnnnnnnnnnnnnnnnnnnnnnnnnnnnnnnnnnnnnnnnnnnnnnnnnnnnnnnnnnnnnnnnnnnnnnnnnnnnnnnnnnnnnnnnnnnnnnnnnnnnnnnnnnnnnnnnnnnnnnnnnnnnnnnnnnnnnnnnnnnnnnnnnnnnnnnnnnnnnnnnnnnnnnnnnnnnnnnnnnnnnnnnnnnnnnnnnnnnnnnnnnnnnnnnnnnnnnnnnnnnnnnnnnnnnnnnnnnnnnnnnnnnnnnnnnnnnnnnnnnnnnnnnnnnnnnnnnnnnnnnnnnnnnnnnnnnnnnnnnnnnnnnnnnnnnnnnnnnnnnnnnnnnnnnnnnnnnnnnnnnnnnnnnnnnnnnnnnnnnnnnnnnnnnnnnnnnnnnnnnnnnnnnnnnnnnnnnnnnnnnnnnnnnnnnnnnnnnnnnnnnnnnnnnnnnnnnnnnnnnnnnnnnnnnnnnnntagtagtagtagtagtagtagtagtaaagaaagcaagctataatccatggagtccattttgtggccacttactcctgagcatgggctctgccccagaatatgatcactcctttgaagaaaatggattttcccctcccagcaggtatagcttattggctaggggtaggactttgttttcatttaatgtcctctgtgctgtgagtttgtctggcaagaacttgtgaagatcttatgcatgctgtcacagtctctgcaagtccatatgtgcatctgctctgctgtgcctagaaaacactattttgttaaagttgcccaccgcctcttgttctttcacacttcttccatataaatccttgactctagaggagaggagtatgataaatacacctgtcttgtcctgagcactcctaaatcttttgatttctgtatgttgtccagttgtggaacctgtgtttactatacactactgcaaggtgaagtttctctgatgacgcttgaattgaatgatgtactgacctctgtgtatagcagcatgccattaggagtcagtttactgctctgttcccttaatatatatatatattatatacatatacatacacatatatacacacacatatatatatatacacacacatatatatatacatacatatgtgcatacatgtgatgtatatatatatatacatgtgtatacatgtgatgtaatatataaatgtgtgtatgtgtgtgtatacatgtgatgtgtatgtgtgtgtatgtgataaatgtggtctgctgttctatcatcataaaattttaccctcacttttcctttgctcagtgaagtccaggctgcccaaggcatttcagaccccattccttgtctaatcattaccaatgtgctttgctttaaattctgtaatccacattttctcagctcccgaccaccattaaatatccttatgtctcaactggaaaactttaacaaatttctactttttaaagttcccaccatcatgatttcttacctcaaaaccatcctcaaaccacagccagtacaacacgatgctgtatcttttatttttagtattattttattagatattttctttatatacatttcaagtgctatcccaaaagttccctataccctccccccaccctgctcccctacccacccactcttgcttcttggtcctggcattcccctgtactggggcatataaagtttgcaagaccaaggggcctctcttcccagtgatggccaactaggccatcttctgctatatatgcagctagaaatatgagttctgggggtactggttagttcatattgttgttccacctatagggttgcagaccccttcagctccttgggtgctttctctagcttctccattgggggccctgtgttccatcttaaagataactgtgagcatccacttctgtatttgccaggcactggcatagcctcattatgagacaggtataacagggtcccttcagcaaaatctttctggcatatgcaatagtgtctgggtttggtggctgattatgggatggatccccgggtggggtagtctctggatagtccatccttttgtcttagctccaaactttgtctctgtatcattatttcccgtgagcaagatcgaagtctgagtagccacatattccaaaatcaaaaggctgagatcttaattcgacaaggccccttacaaagcttcaggatgtcccaccccatacataggtttgctctgaaaattgtgtctccctttgtcttataaaagacccagctgttaaggggagtttgatgatgatgacgatgatgacggtgatgatgatgagccaacattgctctcttcactctgcgactaggttctttaaagtggctttgtagagaaacattactggagtgaagtcacaagtcatcccataaagttgccccacatcccccacgtcccccacgtcccccacgccccccacatcatacttcttttttctctttctccttgaagacatggccaggcttgctcccctgtgctgtcttaaaacacctgctggccttgcagttaacatccaaaactaatgagaagctgtgctaataacaattatcataataaattggcctttgattacatctgtcacctgagaattccaaagactttacaaacatcaattagtgattccagctccccggattgcctccagagagaggggctcagtaaggtcaagtgtatggtatgtgggggagcatgaagggcagctccagcttacgctgattcagattgaggggatcgctggctcttgatggaaaacttaagcctctctccacgatgcccaacagaaacacacttctgacatcacaattaggggagaaaatttatagccgatacatagcccggagttcttattgttgaggaatgggaagcatgaactatagcctcaaaagacagcttatagatttcccagttcccttcttgtgggagaaaaatacaaacagtgacttcaatccagcctcccctactcccaccccatacataggtttgctctgaaaattgtgtctccctttgtcttataaaagacccagctgttaaggggagtttgatgatgatgacgatgatgacggatgatgagccaacaattgtttactatgggctttctctgtcagtgggtgatgaaggagatacagccctgtcctcagggagctcatagtccagtagagaagacagaagtgaaaacaaatgtgtgcaataaactgtttcaggaatcacttcagaaggcccggtataggccttgaaggtggacaggatctgttgcaatgtttgaatttaccatgaagtccatgaatttaccacttcccaggcaggaaatggggtaaagggaggtgtatcataagcatacaacatatggaccaaaggccatagatggaaggactccttgctacacttgtgagatttagtgaggttgtctgtgggacttggggagacggcaagggacagttggagactacataatgggagccttgcctaccatgctaaaatccatggttttctttctgatgaaaataggaaaaaagtatactgggataatctcagcattaacatgttacaatcatacaggtacgtgtgtacccctcttccaggcacatgtatatacaaactctgtttatcatggtgagatgtgcagagggcaagttctcattccacagatgctaccgttatcatgaagaacgtttaagaaatgtatcaaggtctctcacccaatgaggcaaaaatagaattcgaatgccagtttttcattattggtggcatggttagtatgtttaggcatgataccactaatgacagggatagaaatgtctcccattttcacagcctttacattctagtggggaccttggaaggtgacatccattcagtagacaaatagatgattttatgtggtgatgtctaagaaatacaaaggaaatactaagtgatgtactaactgaatcttccaaaatggaattggtaaatctaacaaggtggagtctttgctattgtaagtttgcagaatgagcactgggtcctttgggtccataaggactgttgtctactctaatgtcaaactaatatgaacatgacagctgaggactctttcctttaacactctctatctctatctctatctctatctctatctctatctctatctctatctctatctccatgtttgtgttgtgtgttgttcctacacagtgacagaaggcaaactagagcatatgtctaagtctaaagttgatgtccagtgtcttcctcgatcacatccatcatatttgctgaggcaatgggagctcagagcttgctgattcaggagagtctagctaactaatttaacctaagaacctctgtctcttcccaggtgctggcttacaagcagtctgccacactagcctggcttttacactggccctggaaatctgaacttcagccatcacgcatgaagaataaacactttatccattgagccacctctctggccttcattgccattttccttatcatcctataaggcttttgctggcagctttgacagaagttcacaaggcataatttttatatataccaaattttatgtaaaagatgtttctcaatatagccttaccttctttttactacaagttaaattgatgtaacctatatctgaggcatgtttaaagactttttgagttgcttgtttatattgtgtgcccagtttcagagagttttccaccttttttcaatcactttccaggttatttatatttcacagatctgaactcttcctccgggtgatgctgcaagtttctctgtttgttactcatcttttgactcgacttaaagtgttttcgtcacaacagatacaatataatccaacgcatcatttttatttattttctagcatttcaatactgagctgtagttagaatgccttttacatcagacacaaatgggtccacctggggttgcttctaagcagttgcttatgtggatttttgctgatgtttagatttttgatgaatggtagctaatttcaggtactatgtaaagtattttattagctacttctctcattgtgaccaaacatctgacaagaaacaaattaagggagaaactatttattgaggtttatgggttaaagggatatactggatgatgggaaagagtagtcgcttgggtagaagcagctgtcctcattgtccactaataagatgcagagtgtgtgtgtgtgtgtgtgtgtgtgtgtgtgtgtgtgtgttctgtaatgggtccttaccagttgctaaaagaagtttccttgatgggacaggggtaggggggactagacccatctgggggtataagggtaaatatttagaaaacaacagccaatcaaaatgcatagctgtggaacccagtctcagtggacacaattacaaaatactctgctcctaaggctcagagaacaatgttaagaacaggcagaaagatttttaagagccagaggataagggactttgctgtgagagggtatctcctagtaatatcagacactacacacataaagcctttttactgaacaaggatccatcagtagatgtgccaaagtggactgggaaaagaccacaaggccttatcactatagaaagaactttggacaactaaggtgtatggattaggatcggtgtaacattaggataatgttttaaagtattttgctaatgtatttttattgtggtttcagagttttgtgtccaacattttagtctttgatcagttgaattggtgtttatatggggcatcagctaacagtcatggttcagcctttacacaggagcatacaattttctcaacattattcattgaaatagcagtcatttccatgatgcataggttcagagagattgtcaaggtttggttggttgcagatgtgtttgtttctaggatcttaattctgttcattgacctgtgcatgcatttttgtgccagtatcatattgttttatttgtgatatgtttattgcatgacttcagtttaggtgttgtgaggtttacaactttctcagttttccttaggttattttggttgtttgattccttctcgctgctacatgaacttgagttttctttcctagccatatgaagaatggcattgattcttttaaaaagaataagaattgcattgaatcgtcaaagtgctttgaataataagagcattttaacaatattaatgcttataactcataaatataggaagtcttttcatttttgtttgtctcttcagtttcacctgtgttttgttacagtgtagatgtcctttgcttccttggctaaatgatttctggtttgggagtgctttcaaaggagattgcctttttagatttgtgagtttctttctcagcaagccagctgagaaaaatgttccaaatgtgtgtgtgttggttttgtgtcctccctttttcttaatttctgtctcatttctagcagacctttgcacacgggtggtttggcacttcccttttctatttgtatgtcttgtgttgcattcatctgatttctctgctaacacttctggggtgatattggagaggaaagatgaaggcaaggccaggaggcaaataatcctaaggacttgggcggctaagattggaggattacaagttcaagactcgaattagctacagtgtgagtttaagatcaacttgatcaacttagaaaaattctgtctcagattttgaaaggtgaaaaaagaaatagcgtcaaggcaaagtatttgcctagcatagcagaagtccaggttcagctcccagtacctggaaagaataaaatatggtgagcataactactcattaattattcaatactttagagaaaatactttctcctttgctgtcacccagtaagagattggctattagtttgttatatttaggttgttttttttaaattgaagagccagcgtctgtacctatggtgttttattgtttatttttgcatcttttgagatgagcataggatgttttgtcctacatggtagtgtttgtgtgcatttcatttgtatagttgagacacccttgcattcctaggataatcaccattcagccattgatgctgtcgttgtcaatgtgccattggactcaatttgctactattttgctaaaatatttttaccctaggttcattcaagatgttgtaggatgatttttctttctgtcctgttgttgttgttgttgttgttgttgttgttgttgttgttgttgtatccttgtttttaggataatccaaatcaaaatcaagagaaaaacatcagcattaaactaaatgacagagtaaaggagcctttatagctcatcttagccaataatggcgcaatacacattatttttattaacacgaaggaaaatatttgatattttcctctactcattaaatgattttttttacttaacagttttaatgttctttgtcctccatttaatatttcttagctaacttctccagagctcaatgcattctttcaatatatagattcggcctaactcccagtaatctactgaattattattatctatctagttctttctggctaataggggttccatatatacacatgccatatgttcttgattatacttttgggccacgttttataaactcttgatttttcttgttatttaattttcatagtaactttttcttcaaatgtttattaagcttctctctcagggtccttgtcattaatcatcctttgggaggtaattttgtgtcatttttccttcgtttcctttatgagttaaactagttctctttgcattttctccctctgatttctgtgacatttctgcttttaacttgtctatttctaaaccagagggtttttttcccaagaatattcagttcattttaaagtgttgggttacttttgttttctcttctgcctgtttgtttcctggtaggaacacttccatcatctgcatatggctgctttattatttatccaggattttattttgtagacttaaagtggcttactaaatttattatttaaacactcggcgatgacatgacagggacatataagattccaaagataatgtatttattctgtgtgtataatggatatggttgttcataaatgtggaggtcacaggacaattttcaggaatctgttttcttcttccaccatgtagatttgtaaaatcaagtcatgccatcaagcttggtggcaagtacctttacccaccaagaaatctagccagtccctgcagtatagatttactgagtgtttactttgtaccattggtgttgaatgtgtatagtcatttgtttacttttgagatctcttgccctctctgatggcttgtgttgacaatcatagacacatttcgttcatatttatctcttaccatgttgcaaacagggacaatgcagtactaataatgtctgtttgttaattttggtgagattgtagatactgactgtctttattttcctgtattatttctgaaaaatgatgcaggaatatttgatgttacattgttaatgacttttcaactattcatagccaatagaaatttacacttatttggttataggaagtgatgtaaccaggaaagacaatgctaaaatcaattttttaacttaataatggagtagcaagttgatgtgaagaactttaattaagactgttggtagattatgtttggaataggtttgatagagtgattgagttagaattttttttcaaggtctgcatattcaattgtcaatatttcaagtatactgctatgtgagcctacatatcaagagtaacagtgctagaaacaacaatgacagtcccaaagactgaatgttcaaagatcgttggtctagcaaaggataaatatctatccaaaaggcaagagtagggggaggaatgagggaaaaaacgacaggtaagagcaaacctgaaatacagagtaacccaaaagtcaagagtataaaagaggtcagggaaagagtgatcagctgcagctaatgatgacaggtcaaggaagacagggttggaatagcagcaattaaagatgaacttgagctgctcttccctgacctgatgggagcctctgactgaaggaagatgcacagagaaggtgagccaaaatgatggaatcccctgaggaaaaacattcaagtgaagatttgagagtttaagcttggctgtatgttttctgaataggctaacctgagacttagcagtttcctccctgagagctagactctgggttctacctattgcaagaaaaaaagcatagcctgatgctatccatgaacacctcacaaggtgacatggataatgtccaccacgcacagtgtgtcagtacaaccatctgtctgtagctcaagatcttgctgagttccaccccagtgactaagggatcacaggcactagcacacatgcccagtagtaaacccaatctagtatcactctggctctcttaccaactaaaaggcatctgtgaaggtttgtattttctccgcccagggagtagcactattagaaggtgtggcttgttggaataagtgtggcttattggagtagacatgtcaatgtgggtgtgggctttaagatcctcatcctagcttcctggaagtcagtattctagtagcagccttcagatgatgatatagatctttcagcttcaaccatgcctgcttggattctgccatgctcccaccttgatgatagtggactgaaccactgaacctgtaagaaaagttgctttggtcattgtgtctgtccataacagtaaaactctaagactgtgtcccttctgtctttccctcaaaggagtctcccttactaccacctaattatgctgggtctccctaagtttctggaggccatgtgcttccctttgtcctctctgactttctgacttctctgaggttcctatgtcaaatcaaagcagatttcttttcattgaaaaccacttagcctgtttgttctcggccatctttgtgtgatgactcagaaaagcagatgaatggcaaaaagttggttgcatacagatgcaaagaaaaaaggccacttgcttaaaggttattttgtatttcagtctggtttgccatctgcgtaaccttgaaaaatgtcatttaatcttgtcttctgagagaaaacaaagggggcagggatcgtagtgttcaaatgtagttgaagaatggaaatatataaaatatatagagttttgtttgaagggtggagccattttttaaaatgtccttagcatttatttcatggagttgattccaacaaagatgagcaccagcttaaggaccagggccctagagttgggggaagcctgggctgagggtgcagtcatcattgaacccagaaaccctatactacataagtatggagtggcctagggtggtggttgcaagggatggagctctgcatccagacagagtcatgctgtacattgtattcctagggtaaggggaggctggatcaggactctgcctgatccaacccattgccactctttcatcttttggttggtatctacaaccaccttccatcctccgtctcattttattattactttagtctgttcccttatccaatgcttttgacatgttcaaaatctaaactttgccttcttcctgtttatataactctcttgcttttaaagtataggccaaagtgctatttatagctcctgctcacaccatggcccaagtaattccttgtgattatggcctctccagacttcttcatgtctgcactgagctcttcattttcctactccaattctcagcatatctgttcttgggtctggacaaccctccttgacacttcatatatctgactcccacttctcttccaagtgtccgactgaatactctttcaaagccttatagcatctcccttcctgcccacaatctacattgctttctttacacctaacagcttctgctcctattgcttatggctacttgcacttcaatattttacttgtggagacagctgtttaatgcttatccttaccccaagagtgctcagcctgcaaagacacagaccatgtctattttgtttgttgttgtagctgtggtacccagaacaaagccagacacatagtgatcattcagtaggtgtctgttgaagagctgactaagtaataaagataaagggattgggtaggttgctggttcttgggtcttagaagaaatggaggacataagccaaagtcactggaaaaactaaggcaagacttcaggctgaaggtcaagacctagcttactaactgaggaagttagagaagacaaagattcaagacagggagctggggaaaacatttgaaaagcatgaggtcaaagttaaaccctcgttatactgcatcaggaatctaatgggataatacagtaagaactgcatgtattatccaatttcccaaggcttctcggtggggtgaggggtaggggtgatgtatcttaaacttctggacaataaacagaaggaatgggcatacttggatgctatggatatttgtactgttatcttacattagggggggcatcagacaattgcaataagctgctaaagtatggagtagcatattatattattgagtaagttaggtttggcttactaaaaagggcaattatagaaagaatgtaggcagtgatgtaaaactgacttgcctaagacaaggtactagagagtgggatcaagaatcaaggagatagaatactagaaagcagtaatagtacagggagctaagactagatccagcgtttgagaatgtcctcaggatggtccagcttctccacaaatggagtcttttcctctgtcatttgattctgggaaagagccacagagagagatggtggcttactagaacttacccagctctggcagagctaggagtagaaggggaaatctcaacacaggtactgaggtgagattgttataaattcaaccccaaggtgacatacacccgtatgacaattgtcaagtctatggcaggaaggaaagcatgagtgttgtttgaaaggtgaggaaaacgatgtgtgctgccttgacaccgattccctacccagagcatgttttagtggagatagaacaaaaggtactataccctccaggtacttacacagtctaagcagagagaaagaatttacttcctgcttattaatctgatcgggactctgaacatatgcacactggcaagaccattcatgtaatagaatttacagtgtccagcatgtctcctattttctcattgacagtccaatcaaccagaaggtcaagggaatgattcagggctttgtaattctttacctaattctaaccaacaaagacaaattgcttatggaactaaagctgtcaggagcttagcagaaagtgaacatgtcagcttcgtgtttgtgaaagtcagaaagacagcatatgtagacatgcactctagtgtatagcaagcagatttttgccaagagttgaaggggttatgttaggaaatggctttgttttcgggcttgaaactgtggaggggaagatgattctagataaagttagaaagtctcaaagggagccggaagaaagaactagggagcaagaataggtgatggaacaaacccttgtatctatccatgcttctcccccacacgttaatatatacctcaagagattaccatagaagatggattaatctttcctttttcaaaaaggaagagctgagacagcacctggaagagacatctgggatgttggtgacatctgagatgttggtgacattgagtccttagacatggatgctggtcataagtgtgcgtgaacttgttgaaaaatctgtcagattgtatttaagatatgtgtttaagatgtatctttgtgtgtcatatctaaatagcactgcaacaattaaattcccttcaggacttctcttcaggcttagaatgacccattcattataataacaatagtgctttgcttattcatttaatattttcttgttaaaaagtttgtgtataggaatgttttgcttgcacatgtgtatgtgtgccacatatatgtctggtgtgctctggagtcagaagagagatctggatcctgtggaggtggcattaagaacattgtgaatttctatatgggtgctgggaacttaacctgggtcatctgcggggccagcaagtactttgaaccactaagccatcactccagcccctcccttcttaatattttctgatgcctatgattctatgtagttttgttctagcattattcagttgtaactgcttcctcatgtcctgtgttgacatgccaccacttcctctctcatgctttcgtagttagattaacacatttctcttagttttcactttggatccaacatgtttaaacattaggctgttttctacattcaatgttattttctgagagtactctcttaggtagaaagattgtgtctgggtcagatctctttaaagttaagatatgtagactgagcctcctgcctgtgttcacagatgtagaatcgtagatatggatgacattcttaaggaacatgaacatctgtgggtttggtttccatggaggttcaggacaatatctagcttagatagcaaaggatgactatattttcaaattcctccagcagtcttggcttcatgcacccttcgcccaccgttacatgtaactaccatgcatgaaaatggcaagttttcttatataacattttcaaaatctttttcctttgcacaaatttgaagttgatgaggctctgactcacatcttacacctctcccactcttcagtttcccagcagtggtcagtgtgatcctatcctttagaaggcttcagatccctgtgggtcacactttctctaactgtctcaggctctttaaactaatcacagaactgaaaaatgacaggaacttaaggaccatcctctttcttcaaatttcagtagcaaaatattagtttgttagctttaccgtcatgtacacatcttttggatatcagttctttttcaatacatgcctttttggtcatatttatttctgtcttcttgatatattccttaatatatatatattattatatatatatatattattatatatatgtatatatatatatatatatatatatatgtgtatatgtatatttcaattttcatatgtaatcctaaaaggaatacttcagatatctgaaccataatttgttgaactgttcaacccatggttttccatcctattaaatttagttatttttttacaggggcattttcataatgagaaaagaaaccctcattccaaagaacaggtcatgccagcccaaccttcttgctttaagaagcacctcagatgaataggttgggtgaagcagtagatagaggatccatatctacaatgaacttaaccatcatctcacgcctctaccatgtggaagctacaaagcatgaacacttgagctatttacaatatccgaatggtgaagcagtcaggcgaaccaatagctagttagttcaaagactctgatgtacacatgaatgtcggtcaggaggagagctcagcatgcatactctacttctggcattctcctggttactactgactaattattggcataaaatgtcagaaaattgctctctaataatgtgtaagtgatagaaatgagatagggtattatattcagagattaaaataggaatagtattagaatcagagcaaataaggcagaacccatagtgataaatacgactttttacttgggatgggaggctggctgtgctactagatgctcaatccaaataataacaatacaatagtcccataatgatgtgtggacaaggcttaataaagactgtgtgcaagctgggcgtggtggcacacgcctttaatcccagcactcgggaggcagaagcaggcggatttctgagttcgaggccagcctggtctacaaagtgagttccagggcagccagggctatacagagaaaccctgtctcgaaaaacaaaaacaaaacaaaacaaaacaacaacaacaaaaaaaaccaagactgtgagtttctgttcttgctattgctcgctgagaggcataaaagggaaggtatcccaagatgagtatcaaagatggcccagaagacttgaactctaatcttacaggggcttgttgatgaagaacgcttatgatctgacgattatctttcagtattttaacccttttcctctacaagcaagggcaaactttctgtgcagccaggagctagagtcaggacagaaggacttcgttatagggaactctatttgagctaagaagagacaagttgttgtatttcaagggttgtgcatagatggaagagattctgccagcaaccatttcttcttagcttctgggtataagatatagaagactccatttcccttcctcaatgaaagtgggtgtggccatattactagttctagctgatgagaccggagtagaattgagagtgtcacttctgattcaaggcatttggttgctagactttcccttctcagcatgtttttccttgggaataaacatggataaagcagctgccttgatctctcagagtaaatatgtcatttccatgccatgtctctctatcccatccctcagacccaactacacacctatatggaactggtagtctgagtagagaataacactttgctgttcctatgaatggaagtctgaggggtttattgctgcgatgcaatctttgcaaccagatggacccaaataccttcaaggcagagtagatcctatatgaagccccgggtccctgacatatatttggtttggtatctcatactttgccttctttgcgtttcctttctttgctacattgccttcaaactgtaatgtagtcagctaggatttctgctggctccaggacctctgggaaatgagttccaggagagaaggctgagaaaattctactcatgagcacattttgctgtaactccacagcatgccagcaaggtcacagatttgtggaactggttcacttggaaacaactaaaagttcacttggtaaagattttatatacagactaacagacacacagatacacagacacaccttcacatgacaagcacatatatagaggagacagagagacagagaaaaagacagagaaaaagacagaggctgacacatgcatgtatgtgcacacacacacacacgaggggggggagaggagagaggagagagagaaagagacatagaaacagagacagagtgagttagttttaaaagactataaaacccatcaaagatctcagggccaaaacaaccatttggaacatgaactcattgtgtggaacatggaatcatggtgtgattcacaacacacatcacatagacttgactctggtcacatgttccttcattctatacatgtaaattagtggctacttacaacaaaatttcctaaggaaggcttggtttcatctgctacctcacacttgagaacaaagaatgctgtaaactctcaaataaccactgagaactgcttaactttctgggtgctagaatatttataaagtacttctgcctgatgaaaaggttgaggaggtagcaggtaccatgaaacaaacagaacaacatatgttctgagcctgagaggaaatagagagctgaaattaaaaggtgatcccaatagtggggggaaaatggaaaggacaaattttaaattataattaaatacatatgtatatacacaattccctaagtatttttatataataatccttatgtaatcaacaattaattaagtgctgtctcattcttttttctccctaggagacaaaaatcaactgtgtgcgtctggctacaaaaggtatgttgacatgtccttgtctgactatagctgttcttcaacaatacaaccattgctccttgtgtccacacaagggaaatttaggcaatctttaaaacaaaaggaaatatttgtatttcttggggtcatttgcatctatagcatgtatctcctaagaatatgctgatagcatagagcttaaagcatagtaagaatgccaaaatatatattgggtggatggatagatggatcaatggatggatggtacattaatcaatcaagtaatgaaagtgaaaataaagtacttttaaaatattaatctgatgtgtgtgtgtgtgtgtgtgtgtgtgtgtgtgtgtgtgtgtgtagttccagtgtatttgtgtctatgtttgtgttggtgttttcctttaagcttctctattagagctgtagctgtggttttgtactttattcggttatttcatggttatcaaatatgaggtgattagtattggcacctttaaaacaagagagcagatgacactacattgttatgtcctctgcattccaacacttatcccccaaacatgaaggcaacattgttcagcctcatcacttttgttctcctaattataattgaattgcctggctctttcaattggtacatgtttctgtttattaccttttttaaaaaaaaaaaaacaaaatcaatgaatggtttgttatcatttaacctattacaaggttgaatggttagaaatcaggtttatctttttcttacagaattgatattttcaaaaagaacttcccccaccaatacacatgaaacaaaattggcttctgttctctgcatttattcacagcatacacaatttcacagtttacttccaagggtgtaaaatttataaatataagcatacatattatcgtagctataatagacaaagggaatgactggagtttgtatatgtatgtgtttgcatgtgaatgtgtatacatgtgtataagcaaaagagtcacaaacatttgggtagaaggggagatacagtgagtgagtgagtgagtgagtgagtgagtgagtgagtgggtgggtgggtgagtgagtgagtgggtgggtgagtgagtgagtgagtgagcaagtggatataaagacagacatggagaaagaaacagacaggaatgggctagaaaacataactagcaaagcatgctctttgaacgtgacctcttagaatgtttctaaattctaaagaattcaactgcacatataggcaccaaagggatggtacaggaaacaatggagcattgggactgttggtggtaagaggtcaccaaggctgttatgtccctaacttgttccctctgaggaactcaaatggctgtggaaagagataaaatagtcttcttgaggcttggggattgatgatctgcagatagaagtgacacaaatcacagaccttacaggctttgtcactgaagaaaacagataatgtagaaggaaggacatcatcaattgggtagcactggggctctagacagcaatcaggaagctggtatctgcagcatccctcttaaataggcagccagagaagaaagagaaaacacagagaaaatgccttctccagagtaataatgtcccatggcttccagatacctttcactttagacagggaagaggccaaggggattgctgttcttgctgtggcttctaaggacacgctgagacacagatctctccaaagagtcgtttactaggtccatttcgcctgagaactgggaacatgagacttgagaagcaacaggtatatgtaagggtaatgggatgatgtataaggctgtgctttcctgccagcctcaggaccatagttctcaggagtatagagtgctactgtactggcttctccgaagacatgttgctagtcagatggagagtggtaaggatattataagaactagaacaagtatccagtgtatttctccataatgtaactgtgtcttctcctgtgtgaccttaggttagaggcttcctttagttgagtatttgcacaggtaaagtgagagtgtgtgaaatagtagttgtgcaaggatgagtgtgtgaactcccagctgactaagcccagacagtattcttaaaggcatttcagcatcagcatcctgcttctgtactagactgagactcaacacttcctccccaaacatagactccattatcacctgggaaaactacctatcactgagaaacaatccatcattgttcaaggagccatcccttatcaacacagcctcagagaaggagtcttgagaaatacagcactaaggttgaaggaaggagattcatggttgattagtgtccactccatatccgtcactgcacttgaaatatcccagagtcaaccaaaagcaaatgctgactgaatccatgtatttcccataaggctttgaaatgaagggtagatacatgagttattccttttttactacctagatcaaatttcttctaggtaggattttttttctgttaatatttttttagcaggaaaaaatttgatcttaggcatcttacagccatcaacattataaagtccccaaaatatgtcatcactctctaagtatctccatccttctgctatcccggtatcttccttgggggcctgctgacagatgcactatggctggagagagagcacatgaccagcgctctggtgataaagtaacctgctgctgtcttgttcctgaccttgggttctctagctgttgtccatgatcagctgtgtgaagcccacagaggcagacaattatcatgtgtttcagccataagtactcatttggagtcattctgaattgaccttaaaaccattaccttttttgttatatactcactggctctaatgtgtgtctctttgtgatctctggaagcaaagcctgaggcaaggatttagagacattttctagtgatctgttcagggaggtctctcaaaagaaatctgtaactggaaaaaaaaaacagtaatgggataggataagcaagaatcttttttcaggaagtgtcaaagtaaggctggatctacggtgaatacacatttctctgcagttgtcttggttcatagtaagaagacctcctagtcttcattagactctggctcctccctaccagtctctctggtagttacagaaatgacactggttgacttagactagatgccagagaatattctggttgtaaactcttggtcacatcaggttttcattttcaggtttgctgcacaaacctgaaatgaggaactggatgccaagccaagatcctcttcctactatctctaccaccctcaggtttcgggatagcagaatgctactagagttgtcccaagtgtgatagattccagaacatttccaattcctttgtagaccacagtccagccctgacaatagacctgcttcaaactgtggagagaaaaacaggaataatgtgtaaataagcattggttttgttttgggggaaaaaaaagattttaaaaaggaaggtaataaaccaggaagcaaagatgatcaatttaaattcaggttcttgagaagggctgtcacatgctatctgggcaagagacagtcattgcaatcaggaaaccacaggatgccttcactgggtctataccagaacaaggccatcaataatcggacatgggtggaggaggatggtggggcagctaacattcactgcagaactatttgttgctattgagaagttaagagggaggggatccattgccttcaattgtgtagcctctggtgacccactaggctccaatggacatttctaatccagtgaacatacaggtgaccctggcaaaactaaatgggtcacaagatcaactgaaatttcattagtcttggaaagaaactgttccaaaagggggcttgagatgggagggagacaagggaggaaagaataagttattagctagaatgcatttcacgtgtgtgaaatagccaatgggataacttaattttttacattgtcggctttctgagagtatgtgggaacttggaatacattatgtagtactcagaagggctgaaattcaaataagagagaaaacgaccattgtcacagaagaagcagcagcctttattgtaaaccacagtcctacctgtagctgctgaagatgtccgagtactgaaggcacaccctttgggttaggacagaggaggccacgtacaaaagaatctctgagtatggtgctcagttgcagaagtgtaaaaggcaattcctctttcagaatctgatgttgatagaacctagtggggaaacccccactcaattccagattcggcgtgcacccaaaaaaccacgaaggaccatcttgatgtaaatacatgaggtcgtttaatgacgaagctccggactgacatgcatcccacacaggagataacggatgttggccacaaggctcggaagctaggggtttttatggagtaaggggcttagggtgtggaattcagcatagcaacacactattggcttattcaaacatcagcagaaaaattacatgtgtgtgcagggtgtcagagttctgtgagttattgactccgttcagatagccctgttatgtcttcacattcccctttaacttatggtcaagctgttcccaggaatgttttaactacggggcataccaaggtttgtttttctttattctcagccccaggtagcctctagatcacaaacaacagcaatttctgagtactttacatgacttacaggtcttgaaatttcatctttctttcaatgtttagccatccaaaggccctaacccagtgactctcctgggccttctttgtatcctctgagcctcgctactttctctttgccaccatcttttctttccagcattatatgagccctgactccccttaagcctccttcaggcttttcctctcttaaccactgcacccccaaaatgtagtctttgttcaattaatttttagaatcatgtttgtttgtttgtttgttttgctgtatgtaggttagaactaacatgtcacagagcatgtatcaagatcagaaggctacttgcaggagtttattctcttcatctaccctatggctctagggatcaaactcaaatttttggacttaaaaacaaatagtcaaaggacaaagcaaaatccctttgcctactgagtcttcctagcctttttttcttaaacttcattcattcattcattcattcattcattcatttctatgggggtgcacacatatattcacacatgtgtggggaatatatatatatgcatggtatatatatacatatatatatacatgtataagagtcaaagaacaacttaattctcaagtacttttcaccttttgtttgaggcaagagctctcattggcctgaaactttttcatagaggccagtaattgtctcttacacttctgtctcacaagaatctagggatctacctgtctccctcttctacatcaccaagactgggattacaatgcacaccaatggacagagcttttcatcatagattgtagggatcccaactcatggcttcatgcttgcaaggaagagatagtgcttgagtacctctttttaaactcttgaactatatgaatttcctccaaccacagagcctttctttcataatgaaccaccatatgtatctggccatcataagtatcagctcaatatacagacattttaagttgcaatatgaatcttacttgctaaagaagaccatccttaccacaaaataacatacatacacaaagtttccactttggttgtggtactcatctcagctgataagcctgtatgtgattaatatttgccatcctgctggatgtcaactgacataagtgtctattttgattatcactgtgtttccagatcttagcacacactaatactcagtaaaaattgttgaaaaaatatgcagatggatggatggatggatggatggacggacggacagatagacggatggtgctttgttgggtcagtagacagatggatagataggtactttgatggatgaatgggtcgttagatagatgagtagacagagtactcctaagttattattcttctaagcccactttttaaaaaagtatggactgtgctctcagaggatacagtaaggtaaaatagggggacaaatctgttatctatgatccccacaagcaaaaacaaacaaacaaaacacaggttggtctttacttttgcttcatgtggacaagaatttcactactccttcaggaagttccttccacttttggacacaccatttgcctggagttcctctcacttttggacacttttgacttcttataatgcctgctaaccagtcctcaaagccacatagtcctgtctagctttcctccttttagaaatagaatttacttcctcagacctgttctcccaatttcttgctcaaatagggtcaacaggtccacacttgcccatcttccagtcttacagcagtgggttgtaaccactccagatgccagcaggcagcaacactcctgccattggcaccagcttttgggagcatgcagctgcctctgcagactcctgctgggtgtgcaggaatggcagttagaaaaatcagctttgatttgatttgcaaactgagctgagtcattgagacaaaataaatccggaaacccatagagccatttgcagagttgctttgcagaagacagccaccgttttaatctagtaaacattctaacgatcccattaaagtgccccccttggagtaggtgctgaaagggaagcttcagaataatgaagcatgagatatgggactagtgtcaccaacagctctgtcttgcccattaggaatggtctaaaactattgtccaacaacaacaggcaagaggcatgggcaatggccttttgtaaacctgctatctttttgcaagtctaagtctgaagtgagttatgtcattccacatttctttcttctctcttcataatggatccacactgctacaggaactgacagctacgataaatggctcttgtttagagagacacctccattttgcagatgctaagtgtgggacccagtgatatgttcatagcttctttatacacagaagaacaagtcacatgtagtacaagaagccaagataaatgtaaaagataatattttgggggtaggaagttgccagccacactggtccaattctacttgaaaggttctcttaggtgctgcatcctggagacgttttcttgaaatcatgagaatcagagacacctggtttcaaaagtttgcttgaaatcatgagaatcagatatatctgatatcccgtctccaagccgttacttgacataggacaagtaatttatcttagtagctacaacatcatttttaaagcaggttccattaagtctttccattgttctttcatccaagcatatgatgaattataaacaaggaacttccatccttcctttgactacacaggtctttactagagcttcggtcctatatagatcttgggtctctgtagaaggtcacagaccagactctagtcatttctcatgtagttctacatatctaccctgtgttacatggactcagattaaaagcatagtggagaaactgaaagggtgcaggcatgatactgcccttggcctttagcacttgatatcgaaagatcatgtgcttagataaagatcttacacagaaatttgtgagagagaggaagagagagagagagagagagagagagagagatcttcattcttcatgtctagaattttcctcatctatttattagcatttgacatgggactgttcctctcttcaaacttgcccagtagtatcggaggagaccccagaacacagcactcccaaacttagctatggtagctgaacagagatataatggagtatcagttgtaagagggaaatctgaagttatatagcacagtaagaaagtcttgactgttgttcagtctttaaactctttcaaactgcataggaaggagctgaaggtgtgagtttgggggttggaggcacagcactgctgttcttccctagctgaaactcagggtgaatatttctgggcttgggcttgtataataaaacaaagtctccttgacctttactactctttaccctgtttccagctagatcctaaaatgccagatggaataatacagcttttcctgaggggtgtacaagaagatgaaagattacatcacaaagaacaccataaaataacctgaaggtcttgaaaaaccccaaccctttccttaatatttgtcttgatgaaacagctggcatatttctctgatctttccttttcctctccagactagctcaaatagcatccttccatacacaccttctttatatcccactcaagaaggcaaaggctggtgcaacagaaacccaggtaaacaaaagctagcactgactcttgtcctctgagcacaaaccagtggagttttaaccaattccgctcaactagaaggaagaattatctggtgcagacctgagataccatggttgactttagctcaaaaacatgcttccaaaggacttgtgtctctcttaaaggcagaaggaggcaatttagacttaaggttggggacattttttgagtaggctagagatacaggttagaaataaagagaatttaagccttatcagtgggctttcaaatgggggaaagaaggtcttcaaaaaccaagccaacacctgttcacctcatagaaccagtggcagatcaaagaaaccattcgacacaaaatttagcttagtgagcctgtgagtttattacaataaccaactcaagtatgggtgactcaaaagcagctgcatcactaagaatctttcctctagcatgggtgataactcatgagagctctgcccctggagctgactctatggtgctggtcagaatcccctcccccagcaagtgttacatctcttgtaaccttggagaggggccctatgaatctcatttccggagcttcctggggtctataatttttgttttcttgttgagtgataactagtctccctgtaggaggacaagactcaatcagaggaattagctccacaacagccagttgtaggactgtttgtgtagatgtgtggtgatgtcaggctccaatatgatgatagaactaaagtatgtcactcagcaggtgatgaataaatattggccactgccattgtctctactcaagaacttgtgtaggctcagaagtataacaagcataaagtctccaggagcactactcagagctgactccacatcactattgaattttgttcctatcacgcactaagataatacatggaccactggtaggatttcttgtcttctatttgctaacctttccccatacctgttttctactaaagattgataagtcattctgttagtttgttagtttgttccctggttgtaacaggctttgtatctcttccagggtatgtaagttaagacctgaaatctggagcagaaaatatggtggctccaggaactctcagctctcttcacttcatactaaagctaagaaattagcttatcttcaagcttgtctgctccagggccttcggtagcctggcagtatctctctacacttgacattcattgcttttcaagaaaagaaaaagttagaggcattccacattctggcctcctatttctttacttgctcacaagtaaagaaatgtcatccatggttgtttatacacataaatgcaccaagcagatcctttgcaaagagatacgagtctcaaaccctccagttataaaccaccacatggggaaattaggtgatggagaagaaaggaagatgtttccacctcttcttcaaatgggttagtcaggataagataagctttgttgcaataacaaattataaccaaagatcagtagcttaataccataaatgcttgggtcttttgtttctttgtttgttttgctatgtcatctagagcatggttgatcactgcaggggaatagaaactccatagggagtaaccttgatcttaaatatctcacttagacatgactgactaatgttttcactccatgcccttgataagaactactacctgatacagcctaacttcaaggtgacttagtgtcttctatacatctcagaagtaagcaggactggtgagcagtattatttctggttctgtgtacatctcctatttccatttccttactgagatccataagccacacctctcttctccttctccactcacaggaaaagtacctttttgtccctgtgctcttatccttgctagcagacctttcctgcagagctgtatccctggagggcaaagtgaggggtctcctctgggccctgtcagctaaactaagtaatgttctgttttccttaaaaaaggttttgtgagatacccattgttacttccactatttgggtaaagaggctgacttagaagtagatgtaattttccaagtgacacggctggtaaatggaaaatacggagccagggttttatgtacacagttagcttgtattatttgtgtattaagtaaaatttcatattgttatgtggccctgtattctctagaggttactaagttcttctttgggtttgtatagcattagattctaggcaggaaaagagacttaactgatctgaatctcaattccagtatgcatagactgataataccaatgccctgacctaatataagaacataacccagtagtgcacaccaaatgctctgtgtagctcccagcatgtaataaacactcagcaaatagtgtgcaccagaagagctaacaaacacacaccaatatactgaaagacaactaagatgaagatgatcccaccatgctcttggaataagaagggaaattcaaaataaacaaacaagcaaacaaagaaacaaacaaaaacatagaacaagctttctcaaagtgtattataaccaaaaatcagtagcttaataccataaatgcttgagtcttttgtttctttgtttgttttgccatgtcatctagagcatggttgatcactgcaggggaatagaaaccccatagggagtaaccttgatcttaaatatctcacttagacatgactaatgggcacaaaaccaagcttggaaacaggagagaaaatcatcacagtgaatggtcttgggttggcaaggtttcaagtcaaagaagtagataggcagatcatcagaggaatggtgctcatgtaccgtgttagggatggttaggaacagtcctggggtggagaaaaagcactagggagtgacagctgcctcagcattaaacaagccttcttgctctctgagtcccagcacccatatcaggtggcccacaaccaccttcagtgacagagccaaggggatgtgaggcctctggcctccacgggcacctgcacttgtgcacacagacctctcatataaacaagtaatttaaaatagcaaaaataatttaaaataagaaaaagaaagaaacaggagtatcatgcaaagccactttaaataaagccttgtggtggttcgttctctctctctccctctctctctctctctctctccctccctccctccctccctccctgccccctccccctccctctttccgccatctcttaagacagtaagagtgccggctgggagtgcttaagcagaccccttttatagtagagtaccctagatgcagcctagacagtggatggagaagatggactgaggcaggagccaagcttcagaaagaaccattaggagtttgctgaaggaggccatgtagagtatgggtcatgtctctccccagccttttgtttcctttactgaatgtgaggtcatcagagcctcgtcttacctgcctcttgggtctgggaagcaaacagactcatagaaagcagtcacttagaacagaggttagcaaactttcctataaaaggtgaagtagtgagtattttcaattttgtaggcctcaaggtatttctcatacttactagctttgtcaccaaaacacacacacacacacacacaaagcaatcgtagagatacttacaagtatatttatattaaaataaaactctggggaggaaagatttgagtgtatataatgatatagtgttcatagatgttatggttttatctctttcctgggataaaaacactctggcccaaagcaagtaggggcagagatttgtctcaacttatagattacagttcatcatggtggaaagctaaagcaggaacttgaagcagaaatcatggaagaaatgctgcttgctagcaggctcacaggttcatgcttagccaccattctgatatatcccaagaccacttgcctaaaggcggcactgcccacagtgggctgggcctcctacatctaaacaatcaagacactccaccccccaacacacagagagacatgcttgtagcctgttctaatctgaacaatccctcagtcgagactcctttctcagctaccacgccaaagttgacagttaaagctaactagaacaccatagcaccaaatactagtcatgttttcttaaccattggaaaaaggtctaagaatcattcttattttatacctacacaagaaatagcatagataccagacttggctcacaaactaaccactgacttagcaagtgttttgaaaaggacaaaatgtcattctttcaggaaggagagttatgatcactgtgcataggtagttaatttttatacttgtccattgttggtcaagcttgacccttgtttcatttttgaaatgatgtatttttttgtttatcatttggtcagagacattccatcactctcaatattctgcataaggatcttatgcagttttgctgataaatgactagggaacattgtcatctgtcactaagggtgtaacacttgctgggattttgtgtcactttatttagaaacttggagggacagggacattaaagatagacaaactaggctttaaatacagcctctgctagttactgtttttgtgaccttgaacaacttgtaaaaattctgagtcaccatttattcattaattcattcttttacacaacaaatattcattgagtacctactatatgccaggtgcaacagaaggccacagaaatatatcagtcaatgggacagagcatctaccatcaaggagactacacagttaaggagaaggcatccactcaaaatgcaggggatgctgcaatgagaagggaatgttaggatgttgtggaaagacagaggatgcacatcttccccttgagagaagttccaagccgattcttgaaaggttagcagttatctgccaggggaagcagcaagaaggaatacatgccattcaaatgactgttccagtatcttagttaaggttttactgctgtgaacagacaccatgaccaaagcaactcttataaggacatttaattggggctgtggttcagtggttcagtcccttatcatcaaggtgggaacatgacagcatccaggcaggcatggtacaggaggttctacatcttcatctgaaagctgggagcagagtaacagcttccaggcatcgaggatgagggtctgaaagcccacacccaccgtgacacacctactccaataaggccacacctactccaacagggccacaccttctactggtgccactccctgggccaagcatgcacaaaccaatgcacaggcatgctctatagacaagacagcaggggctgttcatcatgggaacagggtgatatgctggtagcagtgcagagaagaagatggaaaggagtgaatcaggcaaggaaagatatgaactcatcgagatggtctgtgaccatcaggggtttgaggtttacttttaaggtcagtgagggtgatagtgtgttttgctcaaatggcaggaacttgatgggagagaagtaagaacagagatggtgggcccacgtgaggctgtgtaaatgagtggctggagaaagtgccagtgagacaggagagaggaggaaatctggaagagcttgtcttgagtagaatcaataagagctggtaaccagtgataaatgggaagctaggtagaagaagggtagaaggtaagcaccctgtctaataggggtgaaaggtagtcacccaggtttctacaaagagaagctgtttgggtggtgtaccatttacaaagaaaagaaagactgagggtgatgcagtttgactggggaagtgacaggtccatttgtaataccaccgacctttctgcttgtcctatgtcttaggaacactgtactcgaggtacttggcagaagacttggcatgtcatgggtgcttgataaatggtgacacttactcttttttcatttataaaaatctatttcagcctcagttttggtaaattgcggtgttctctcattcagtgcgagctctttagagccacaagagttatggtcttgctcattgtaccacacgttttcatgtgtgtttctttctctccttctcttctgcatgctgcctggggattggcttccttgtggtcagcaccaatgggcagcgcccaggtgaccccggggactccactctgcctcctcaccacaggtgatcatcagagccctggcaagagggaggggactggtaatggcccgagctctgtgggttctccaggccagctgtaccagagctgaactgacagctccttcatcacatcttcccacccactacctgcccagtcaccgattcatccatctaaccaccattaccttctcgtacctattcatacatccctctattcatccactaccccatcttaccaaggtttaataaatacgtactatgtaccaggcattgttctaaatattgaggaacacaataacaagcaaaagagacaaattctgatatcttagctcaccgatcaaaagactctagaaataaatgtacaattttccctaatactaaggagagatgcatatgatattcaaaatgtacacacacacacttaacatatacatacacatatatatatacacactacataaacacaccacacacatatacatacacacaccacatatacacagacacaaagacacatacacatgcaccacacacacagacacatatacctacatatatacatatatatcccaaacacacagagagacacttatacacatacactatacatacacacatacacccacatatgcacacagaaaccacatacatacagaaatacacatacatagagacatgtacacatacacacacatgtacatacataccacacacatatctacacacacagagacacacatatatacacacacatacacacacannnnnnnnnnnnnnnnnnnntcacatatacatacacactactcaaacagtcacacacactaccacatatacacatgtacatacacatatacaccatacagacacgcaaacatgtacacacacaccctacacacatacattcacatacacacacatatacacatacaaacacacacaccacacagacacacacatacacaccacacacagatgcacacacatacatgcacacacatacacatacacacacacacacaccacaccacacaaaagccaattgagttgtggtctgtgggtgggagaaagctgaccaacagatctgttttctaaggaatgagtaggttggacccacaacctcagctctactgttggccctggtacatcctttaaatgtgactaggcccatatttcctttctgttaagaaagaataataatacttgtttcttagggaacattattggcattagggactctacagagtcagattcttctgagactgcattctaaactaaacaagataataaatgtcaaagaagctggaatagaagtgcccagcctagtgtaagtatttgcttggtgtaaatgagagcctttgtttcttcaaatgcagcataggtagagtttgttacaaataaatagacatagttattcaaaagatacagagtccacccaccagaagtcaatgcccattcaatacatggagaagaaaggtaacctgaaaccatgcctctctttcctccattagggatctccttctaaccaatggaagactttacaagggctttcacgcatttgcccaccattgttcacaactaaggttttgcctgttgagatcactgactggtcgctctatagtgatgggaaataactatatgggtcagtatagcaggcaaggatgacataagccctattccctttaccccttccctaactcaagcatcatactgaccctgtgatggagattcaggcacatactgttcattgcgagatgtgcttagacaaaaaggagaaatagacaggaaaagacaaaggacattgtgtagcccgagttagtcagagccctgcgacatctcaggaatgtgaattgttccacaggttgagcccatgtgctaattaccataggttgccatgggtgttacacagccttctacagaaatggattccttcttgaaagtaggaaatatctatgagccatttacagctagtatctacagtagctgggactaaatacatcaatcaaataaaggagatttggacagaaccccagtagcatccacgtgggcctgttttggtcccagttttgtattgctttaaagcaccacatttcagtgtgtccctggcaaccctgtgagcatctcatcttagccatcccttaattatagaaacattacatactgggcaggcttattttacctgggaaaccaagtatcatggttacttcatgctgtcctattaaagattcaagttaataacctcaacgaatgccctgaacattgggagtgcatagtaggtcttcacaaaatgccagttaccaccctcctctagaacaggcccaccagactcaccttccctcaagagaggcagaagtcatgaatggacacaggggagcatgcagaaagatgacaagagaaaagcgactctcaccgctgtccccaactggatttatggagaaacagaacctccctggagtgtgcacgagcaattccacctatgcttccattgttctctgggctctattcaagtcgagccgtgagattatgttttcttcaaacagagccaatcccatatcaggcacatttgtttttacctctcgccttctgaggcatctgaatgttccttctctgacaggtttattttattgtgctccatttatttctacccgtttcccagctttgcttgataggtgaggtgctgtgagattttttttttccccctcagagcaggctgtccctttcaatggcttttgttaatgtccattccctggtggcaataatagctgatgtaaataataactgcctgggtctgaatgatggggatattggactatatgttcagatggctgtttccatagcagctccagcatggagatacgcacagccatgtgaggtagcatgcatggctcaaccttaacaatggatggagcctgattacagctctcaactctgccactctccggtctggtggtctggggaagttactctttattaaacttcctctcctcacgtagagaggaatcacacccaatgccaggttaataaaaagaactgagctttgtgcttgagggtcactggccagctacttcttcaggtgtccctgaaccattagccttcttcttgaggaaatcctgctctataccaaggcttctgaccttggcatggttgacatctgaggctagatcattttctatggctgaggtccaaactgtccattgtaagatgtttagagaactcccattctttacccactagataccattagaatgtcaacgtcaattgtcacaaccaaatatatccaggcagtctcaaatgtcccctaagggacaaactaaccctctagaaatagcttttaaaagcttcagagcagcactgttcaataaaaataaaattttcggtggatataatttctaattttgaagtcccattatgaaaataaaagaaacttgaaattaacttgaataatataatttatttcattaaacatgcccaaataccatttaataagtaatcaatattttataaaaccattaaatggaagatagttcacattttcatttttgtactgtctgatatctgctattttttacacttaaagcatgtctcagttcagatgcaatgctttcaaacagttaaaaatgaaagaaatactaaagtgataaaaaaattatggatagaggagataacttagtcaataaagagcctgccatgcaagtataaggacttgaattggtgtccccgggatggagatgaaaagatgtttggaggagcacactcctataatcccagctctggggccagctagacttgctgaatctggaacttcaaattcaacaaaaaaccctgtctcaaaccattaaaattaaccacaactggggaacacaccagcatcaacctccatactcatatgcattaaacaaacccatataactgtacacttcacatacacacatacacacacacacacacacacacacagagagagagagagagagagagagagagagagagagagagagagagagagagagagagagagagagagaggaatttatgcagcaagtaaacattcttttcattgcctccatcttaattttttaaataattgaaataaaataatcttaaaattcagtttcctgaccctatttcaaatataggatggtacacacacacacatggcttagtgaatacaatttggacagtgcaaatagagaggtgaaatgtccctttatcatcttggcccctgcttagggaacataggagcaaatggacagagtctacgctctacaattactcccctcctttctgccacacccaaggggatgtctctccatgtccagcaatgaggtgaacgccttccagaccaagactggacagttttctctagaagcctgacctgaagcaacaaaggacaagtaacccctgaattaacacttcacctgcaagacttcaatctagtccagccctcgtctgaaagagcgcctcatccctttgcccttctctatctcagccaggcctctctgcctctagacctaatggaacatgggccgtgtccagccataggccagcatgaatgaattaaaggtgatccctgataacactttgctctggctgccttggccatgttcattgcctgttgttaatttttccacaagaaggactttagcccaagccttcttctgaagcccagaatgtatttgttaaaactggggaccttgataaaagcacccaaacttttatgcagtccagattcctcacttatgaagtcaagcagatgaattccagcctggctagagaaacgggtgtaatcctagccaagcttcaaggctgggagggtactggttagacctcttgtaggcttcatttggtttttttttgtttttttgtttttttctatgtatctcatgctaaggctattactattgttccttaattggggccttgctatgtgacaagattcaggttctaataatactcactgggaggctcagctgcattccttggaatgatatttcatgaacatcctaaacccagatacagagaactgcgggcttcagcacaagtctatgtgggcagaaagaggacaaggagacagatcagcaacctcccagagtcactgactagaccccacagccttgggagcccggaaggcatgacagctcccccatggagcttgtggctctggtggcagtaaacagatggtgtgagtgtagaggctagaagcagagctgggtgaagctgtaagctgaacactcaccactcttggtgaggtttggtggggagaggaggggcaggctctggggcaatctcagccttgaagacaggccacagagaagtagcagttttaggggcagatgatatcaaggaagtctgacagtgtgataagaagaagagtaaaatgaataatggatgtcccatgcttcctacatgttataggaaaatcctcagtgttttgcttttttagcacatgtaaaattccctaaatctctaccaagtcaagtgattttctgattttacagatcagacctctaaagtgtaggcagctggaaaaaaaaatcacagaatttggaaaggatggcaccagaattcaaacccaggtctctctaggccatcttcatgtttatttgtcacactgcctgcccatagccaactttagtaagtacctaggatgagccaagcactggaagatgccatagcagagtgacttaggactgtgccgcatgaaaagccacgtgatttcagagtggttgatctatttctttatcagcagaacagaaatgtcaacattgactgctgtaaagagagaaggaagatgatcattaccttaggcgcatcttggtgttattaaaacctaaacccattttatagataaagaaacagagacgcagaaagagccaggcaaagagtcaagctatccagtggccagacaacagctatcatctctgcaacaagtgaaaaaaaggaaggtcgatgctcaccatcagggcctcggactagaagcctctgaagagccaatcagaatctataaatccaggcacataatgaaactgttatctagcttaaatgctgggtccaatgttataccaagctcagcttctgtgacaacccagagcaagaggtgaggacaaagtgctaaggggatgtaatactaagatcccttcagtctcacacccctccattcagatgggttcttagttggtctcgggataaacctgggccatgcctgcagtttaaaggcagagatctcagtagcaggtcagggatggcagatacacaggacctcttatagctctgccctcaggccactcatgtgactacaggctgattctatatagaaagggttactgcagaacttgaaccagataactgtctgtatccatggtccattcaaagtatggcaagacacaaggccgttggcccatcattctggctgttattctctgttaccagcctctcaactgagtcagtatattttgtccagatgagtcaattcacattctgtaaagagttctacccagtagcacccaaatgcgtattctgccttccaaatggccgttagttggggaacctctgtggctgaggttttcatggctcccattttcactcctgggatatttattccctttaggccaagaagaagtcaagccaccatcttgaattcaaactgccaccaaactcagattcagaaacccagtgttatccgtctcctctctccttccccatctttgctatgtaatctgccatcacatctggctgattctgcctccaggatcactccctccttcttctctgcagtgctcatgtccgagactactgaagtcttactcattagtgctacagcttcctacttcgtagggctgtcttcacatttctcctcttccggtgtgtcctccccactgatgcccaagtgatcctttagatagaagcggtccttcaaatagaagagttttgtcctgattaacacctgccggaagcttccattgtgctgcaggatagccagcctgcttctgccgtcttcatccatccctccaggttcctcctttatgttatttatctgatcacatgagcacttgcctttctcacctcctgccttcctttgctgggatgtctcccttctgtggtctagcttgctaacatgaaggagctctgaaaaagcctactgtttcatgctgaagctacaggcaatagccagctgcctttagccaggaggaagggctctactgaacttggcactcacccatagcatcagcttgtcttgaatctgcttgggttttgtcaacctttcccccttcccagcaactatgcaggtggtttggtaagaggttaatactgttagagcatgcatgaggcacattgcactgtgtctgtcctcctgtctttccttcttcctctgtacagtgatgtcttagatagcatccctaatgtgtctttttccaattttgtgagggctattgtgagtggacactggttttccagcctactaggaactctacctggccccttctaccaaatgtgctgggcctgggcctgctgaaactaatgtctgccctggctttgcatggggctggcacagaaaaagtcagatatgaacaggatcatgagagagacatgatacgtcagcatgaccagcatactctactctcctcagcccaccatctctactaggagaggagttatagtcccacccaacctttgaggaaggtgatggatctatgttagtccgatatgaactgattcagtgtttccattcagaaaaaaaaaaaaaaaaaaagccacgatgtaaaggctagaaaaaaagcaaacacattcctggtagatttggctgcaatctcaacaatcgctgccctgctccttgctggtttattaccctcgcttgccttagttgagctaatctgaattccacgctgcatgttttccagctcctctctgatcctgcccacacttcctctaatccccaccatagatttctccctcccttccaggtaccttccctcttttcctggccccctgataacccactcaaaactgcatgttgtagaggcatgatttggactaagctgccccagctgggcagatctttgtctcctttcccgcattctgccccctctgagtcaggtaacacactcatcccttgagggatcaatttatctggagttgtttagaaaaaagctgaacttgtttttgaataagagcctcggggagcctcagtccccagtgctccctgctatgttattcagacagaaagccaggacatgtccttcccaaaggcctacgttcagttcagactttgtctgagcaagaaactctcttttctagcatgctgtctgtgggccatgacctcaggcattgtttaccctttgcttagtgaatttctaagatcctcatcctgtctttatcccttcctgggctgcttgtaacatcatgactcaactaagttgtatgtcaaattttgtctctcaacagatatgttgaagtggcaaccccgagtaactgtgaacataaatttattcataaagtccccacagatgtgattagttaaagcaaaataagaaagtgggccttaagccagtatgtcagaagagaagagcatcgtatgaagacacacacacacacacacacacacacacacacacacacacacacgcaggcaaagcagtatgacaaacactggcagaggctggaatagtgcatcttcaaggcacaaaatgccagaactgaagactagcaggagctgaggagagatgagctcttctggtttcagggacaggtggccttggtggcatgttcattttggacttttagtctctgcaaatgtcagaatccacatctgtcagtttaaaccactccaatggcagtcgttgttaacaaggccttgggaattcgaacgcttgccaacacagtgaacttgagcttgggggcggtagtctgtggctgaacctcaagtgtgatgcctttccagtggaaaggcctctcagaaaccacagtatcaatctctcagacagtctctgacctacatatctctcccacggtgtaccttcatttgtaatactatatatttcttctaaactagtctctcctccatggccttacctttctgatgtagctttgccttccatgtgttattagtcataagattcgctgttggccctcccctgcctcagcctttacagacaaggcttatgtcaccctctctctgtgtcctgagttagaagccctcggcaccatccctgcctggcttttgtattctgtcatatgctgcttctaggagggctttgcttgctgcacagttgcctgagcctgggctcacatttacagcaagaattataaccagctcaccagggccatgtggtctttcatagcagctgcctggaaaagtccaaagggactactgctttgctgtggggcatcctaaggagtatgtgttctctcctacctctgttcctcacactaaattcttagtccccagtgcaagctgtgggtatttctgttggtgacagccaagtggcttagccccctgacagcccccccccaccccccgagttccaggcttgatacacagatctctgcaagcaagaggcaattctgttggtgtagcgctagctcaaattctccatcttcatccgtggaaaaggccttgtaggatcagaggacaccagtgtggagataggtgagagggggctgttggatggtggcagggatgcctgccatgtgtgtcagaccactaacatgtggaaatcaagtacctagtctagttttacgtagtcagaactgtacatgcactctacctgggtatatctctgtgtgagcatcctgtgtgtgagaccttttcagtttacaagttccttttccaataagaagtaagctgcatgatggcaggatggtttctgcattaaccctcatcctcagcacctcagagtaactactaccattgctataactgcagcatctcccaggttaggccatatccagggaatgtccaggatcgcccctctggggcttagtgttgaattggtgctaatgagtgtaatgcatttgaaggtagtttaattgtcctggtgtaaattgtgtttctgatccaagtcaaagcccaactctagacctggtttgatccctctctatgaatatagactgccagagcctaaatgtaagccaaaggctaatgcctgacccctgctttagatttggccccacctcattacatcctggttgttaaccttgactatggtttgacccttctgagctcagtttacaaagtgcatcttcttcctaagtttggagacaacttttgtccccaactttagcttagcttacagtcttgttctgaaagcagataagtcttttctctaaatttgtccctgggccctggcagtgcacataggctagacctctccagtgcacaaaaaaacagttgaagtcaccaggagataaaaaggtagctcaagcccttgctctgtcttctaggggtatgtcaatcatgcctgtgtatagagtctgttgcatataactacttttgagtaagtcaggtgataaattttaatagatgaaaagtattttgtggtaaaggcagtttcttgtacccagaagggcatttctgtaagaacctcattgtgccatctcacagagccccttacaaccaagttagaatttgacctatacagaatattcattatgcaaaaccaagtccacctagaaacacagagtcaggagatccatgggatgaagcagaatcagcaccaggggaatgatttattcgagtggccaaagggctttcaaacaatcaattaaagtgattctcatctcacacggtgctaacctccatttaagatggaaaatgagggcacctctgtcagcaatatttagcagatttagttgtataggctatgatgaagtcacttctaacctcttaggactggctaggtaatgttgagggagtgtgggatattagaagtgtgtatcttctttacacttaactcaggacttattaaattactttctacagcaacagtagagcggtctgtgaaaaacccatgtctctgtggtgtcttccggctacttaacattgactccgagttaagtcttggctaaatgcaattactgttatatgatgaatcggggcaatttatttattacttgcaaaacatcctagatgatgtcacttgaaaggagcatgggaagatccttaagtcctccattatcaacccggtccacatcatgaggttatgttctgtgacgtgggggaagaagtcagcaattaaaataaaattagacagcaacctcaaagaaagggtgttggaaacaccacagaaagtgctcacctaaacttgaacagaacatgtctctctgtggaattaatatgaggcgctttggttgctaaatatcaagaaaggtcttggcaggaaagcccagagattaatattaaaactaaactcagagtattagggactttgaaatggcggttgatgtacaagggaagtgaaaagagtaaaagaagttaagttgaaaaggtcaagtttaaatatcacttgagcaaagcctgtataatttagctcatataacaagattcacatgacatgttcatcaatcccttagatattagaataaggtgtgctggctggagggcacacagagaggagcttccagcaaaggcaggtatgaaatggaattgcttggtagagcaggtggcagacccagcagggacagatataaatacccatggcaggtatttaggtaaagatggttttatccagctgattgagataggattcttgatctccttaatacgaggagtctccttctatctcctaggtatctgagggaaaacaaccagtcttgcgctgagcaacctcctcctcttccccccatttaggcgagaagcggcagaatagcacagcagtttaatgaggaggaatctggcttcagacttgcaggttttgtgggtactgctgccagcagctcttatctatccccgttgagcttcagcatctttgagaagactatggtagcagaacctgctccatactgtttcagtaaggattaaaagggggaattataggtaacaggcttaaaacatggttgtagttgaagctctgtcctacagcttatagttaagtatattagtgttttacatgtgctcttgaatcctgctcctctcgactcttccattgccatcttctgtgaagccccagcttagcatgtagctgccatacaagccaaccacaatctctccaccacagccctgacattgctgaaatcaaaatacaagatgggatgttctccagatacctctcaaaagctgcaaagagtagagtctgggatgtttataggaagcccatgttgcccctttgcccatctgatctgtccttctacgttgtcatgttctgctcggacacacagctagccctgcatgcctcctcacccaggccaccatgccagtgacttctgggtttatccaatagaagacctcagttagagttgaaagagtgaaaggcaaggataagccccctcagttagtttcagctcctcctttgtccatgtttgtgtctgccccatggctctaactcccccaaaggtctcctgcagttctagcccttgcaatgcaaacttgccctctggcctctggcttatctgctttgtatctctcctgtgtcagtggttagcagcatcctgataatcctctactcaccagggtcttctgatcctgagtgcttttgctccctttaaaaggcttaggattgtttcccttttcctggttggctgctgactgatgtagatagagcctgtactggtttctaagcatcacccctccccttttatgagtagtaagggctggggaacctgacttaatcatctggtctatattttttttctcgtatcaacatcacactcactagcaaaaaaagaaatatatctgaaatacacatctttttcattaaaaaaaaaaaagccagcaatagcatttgtttctccccaggcttctcgctcccctcctgttcactacaatttctaccctcaaaggctgccaaagtagttcatgatcacaattacaaatactttgaatgctttgggatgcaatttgtaaagtctagaggcttgaatctaatgaagtagccagatgctcccctacaaagttgtttcctatcttggacttcaattccatcttaaaataccctatcgtttagagaattcgcttccagccaactcaagcgaaatctatagcgcatacctgactttagcagagccgggaagttacccagcttccttatctgttccctgttgtctccacttggcaaaacatccataatcagagatgcctgctatgcataaaaccttctttggcatagaggtagcagctcagagtcagggtttcaaaggttttcgctgctgggtgccagatacacacaaagcccaagtaaagacagagaaactcttcaacaaaagaagtcattaagtagacaggggtaaactgccagcgcagtgagatttgcctgagataagccacactggggagaagatgcccttggatagctgagaggccactgtgtgttttaaagagcgcagcttttaggtactgtatccccaggagccagcctcctttctttaccgtcagcaaggatcacgagcatggcttatgcagccactgggatttactcggattttatcaattgcaattagacgttcttcatctgtgacttctatttttgctgcctacccttacagggaaaattctctgaagtacagctacgaaattgggcctgacgccagcgtgagtgctttgagagtgaatcattaatcccttgttgccaaattatgttattgctgccattaagtcatccagatgtatgcctggtaagggccctccctatatgagcagagtcaagtgtatcactccagggatggggactctgcttggctggattctaaggacttggataaagccaggtagctgactccaaggctagcgactccagtctctggttcccaaagcttacagacattctgaaactagttctcaaattgtaacatcaggacaccgaatggatgtggtcaagcaatttcacctcaggactatacctgatcctgagaaaaatctttgtgactttgacattttctctcagtttttacaaatgaggatattatattacattgtgtttcattgatttggccaaggtcacccaactagttaacagttacatgtaaatagaaagtcgaggatttctgtttgaggctcattgctttgacccagtatcataaaaccagagcattttaacatcaaatgaggcacaaaggtcatgtagtcccctctacttgataatgtgtacaacatgtccctggaaagcaccttctactgttggtgacatgctttctgccctgttggtaacttgagaagaggcaggacagggaggagaatagagtgaatagaagttccagaactaaaagaagggcacacatcaccaagattatggataccactgaggttaaggtacacccaaattaagatggggaagccatcgtaaaagggtggtcagggtctaaggagaatgctgggttttaacatgagagggctttgttaaacatctaggctttgaggaagtcagaacaggtaggaaagtaggagccagtaaacaaggaaaagtctacctcttcggtggcacttgggaatgatgatcgttttcatacagtcactgcttcatgatggagtactgcccttgtttggtaaggaatccctggttaaaatctgaatgagagaagcagagtgttaggctccagtggatagttcttggggctccctgatcgattcagtcacttccctgcttttgacctcttgaattaaagagaccaagcagggggttctatcttctacaatggcctgttagtgaccagacagcaagaactggatctcctcagaatagaatctctagacagaagagttcttattctgactaatttccaggtcggtgtaatgtgtattttgccatgcacttaatgcacacaggggctctgttacaatggagctgctgtttccacaggcctagggtagattctgtaagtctggacttttaataagctcccaggtgatgcttggtatcctgattgttgaatcactttcgaagtatcaagtctcttggttcatcttctccctagagagctctctcctgtggttgaatgtacagctagacaaaattcgccagtgagttcagaagagtacagagtagcatagaccagctcttcccttgccaacaaaggtcatagaaatccctggggaagatcagaatgtgatagatgcttggtaacattgtgagagagagacaaacatggcccctggactcacatagggaggtcaaatggagggtggggagtagtttccaagatgctaagcactgtatctgatgtttccagagacaagaacagacagaaaacagaaggtcatgtgtggattgggcactaaagctaggaggggctaagactcgaagtcatcatagctttgaggaaagagtagagggaaaaaatgagcgactgctgctttgagaaaactaatgtagcctttgagagtactcggggcacagaggtagcagctggctagggtacaaggtcagtcctgtagcctcgtgttggagacagctgaattagtaagctgagttcacaagattgtttatgatgaccacatcacacaggggactcaaggagagccttaaagcttatctaattggataaattgccacctggtgccttgatgccaattctcattcacttggattgtgttcctgctgggtcttgtggaagccaaggatgaagaagatgcatccaaatcccttgcattcctcccagtgccagactaaaaggcagaagtcatcagagtcagagactgagtctattagggactgaaactgatgctaagcaattctctgcaggatttccagttctgccccctttgaatctcccctttggatttctgggccactcagtcacatagatagcctttgatttaccagcctcagtagtggcacctgtaaattgatggttatcttgcttggtggctgtgtgagaagctagcccagatgtgcttccccgtaactctgatctcagttctcatcctgatcgccaatcatctacagtgtcagccccaagcatgtaactctgacccaacagaagtgtcattggcacttctcatgtcccatccttcggttcttcctcttgaatctccatggatcttatcttttgtccagaatcactctctgcatgtctatcacctttgaattaccaaccccatccctttataaataagaaagcaaatccttagttactaccgcaaaatctcttagagaatgcttaagagaaagttgaattttctgcaggtacatgttgtatatgaagcccgaatggagcagaaaagcccagttgctcctaatagcctcaagatgcagtctgggctttcagctctgaggccttttggttaaactcactgaacatttctaataccaggctctcgcttttcacatgactacctggaatctggatgctcttctgtggtcctcaagcgtgtaccactagttagtcatggccaccactgaaggggcttctataacaacatcttggtcttgtaggggaggtttcctagtactttaactaagaccttcatttaccttggagcatagtacctgaccccaatagtggttggcacagctgatcattttctgcttctggaaatcctatcttatattggatctaggactctatggccagccatgttttctttccctttctggattttcatgttttatatacaagtttgtctgtctctacctactccctggactctaccaagcttcaagtttctcttccaggcctgcttctctttttacttgttttcccttcctgggtaatctcatgaactctcaggctccaagtaccatctgtggataataacaaattaatccttttacctacagctccgactttccctctggagctccagactcacacctctaaccacctacattcaattccaaagtactccaaactcaagcatagattcactctaaagtttttcttttgtgtactgcttctagaacccattaatccaactctcatcttccacgtcatacaaaccaaagctctgtgaccactcttgtcatttttccactgctgtttcctgagtctttgtgactatcatcttccatctggatgcctatagtagtctccaagctcatttctccaagccactttggctccccattgaagctgggataatatgctgggacataaatgtgaacacattgttaccctataaacagaatttaaatgtctctctgtgtttcttgggctacagaacaaaacttgtagcctacagtgtcatgtgtaaacattcctgctcctctctctagcctctttcttagccttttctctttattcttttttaacctcttaaatactacatttctgccatacaccagaccccttgccactcacacagcctgacccaggatcttggctttattacctctttatgcttcagttgtctagctacagccctgctggtccttcctcccaggagcgacttacttccctgttctgttctttctgggcggtcatgcacctctctgtccaaacccttaacaaagctgaaagtttgtcattactaacttcttgtcctcattgttaaatgccagtgattgcaaactacatgaagacaatactgtgtctcttttgctcaccatgacatctccagatgcctaccactaatggaagtttgcaagtacttacctaaggaatggggtgtgagtcttgatagaccaagtgatgacagggatcatatacaggaagaggctctcagggaatctctgccttgagctactatcctctagaacaggaccttaaaacagacactaagtaaagtttaactacaccatgaattcaatgatttagagccaacctttcctctaaatccgaatataaagattcttagtattggggagctttgaatttggggtgtctctttcctttgggcataatacattatagcctagctttttattagaaatcatatcttaagtctcataaatgggggctacttaggagtcactcagaattacccccactctgtaatgtcagactgccctggctaacgatgtgctggtgattccaacatgaactgggaaatcactggactgcaaaacaccagaaccttctcagacagccctggggttagatgagttggtgttgcctttatcttgtagaaaaaaatgaataaatatatcaccattagctacttgtagaagaaggatttttgcccctacagttagctacttgtagaagaaggatttttgcccctacagttagctacttggagaaggatttttgctaattgtaggagaaggaggctttagtttggccccagcacttggacacacaggagctaaatatgcatgactgcatgaataaataaatagttctggcctgtgcccttctgtcatacacagtcatcacagtgactgtgagaggagtcctttgctagataatggcattgcagcaatgtaaaggacaccacacctactctcaaaggcctcccattcccaccaaagacactctgctatgtaaaccaacttaccaaagttaactaaagtttgaggaaagtgcctggagagaatatatgctctatactcagaagcaaaaaacagaagagttatcagtgagctggaggcctgctttttaaacagccatgagtgtgagatttaaaatgtgagaagcaacgtttcaactcaatgcttagctgagttctatggaaacatgactaaaagcaagagaaaactcaatttggttccatgaggacaaatgtgtgtgggcagagacattatccctttagccaaacaccaaacaaccacaaacatttagcgagcccctattatgagtcaggatccgtgctaacatggagaacaaagataaatgaggtataattctacccccgaggagcttgcagaccagtggaaaagacagatgtaaaaacaggcaactaataatatcagtacattgtgctaagagatatcgtgaggtgtgtgcaaagtgttataaagtgttatcaggatttggaggagagaggaaactctgccagaggcgcaggaggctgcagaaggtatattggctgatgaaggatgaactggtgctgatgttgcagaaaagtagagatgagtttgggaaaaggtgcttccgacttcaagctgcctcacaaaaaaatgtgattctaatggggaaataaagacagcaggagaaaattgccctaggatgctggtaacccatggaccactctacagaatgtctgaaacaggaaattgccctccatccttagtaaacacaagaaaaggctgggctcagcctttctttgcttgcttacttttgctatggagaaacagttggttttttgtttgtttgtttgttttgttttgttttttagaagagaggggttgagaaactagggattttaggagctgaattcaaggtctctgatcactgaggcctaaatgtgttctattcaaaccccagggatctaactcttaatatcatcacccatgcgacttctggcaagtcctttagtttttttcttagtgtctgcctttggaactgcttgtgaggactgggcaagttagagtcctgaatcatccatcctggcttacagatactgtaagtggacagttcccactttccactaccagagattgagtcaacaagttagcacgtagtatttcataattgccaaaattgaaattcatgttttctgaacccaagccaattcactttaatccaccatttttttcctctactatttgctaaaagaataaaacaagatgatcccttggaacagaatggtttttaattgtgttatcttagcataaaactatgattttcattacatgatctgaaacatgaacccaagaattaaatggtggactaaggtttgagctctcatggcagagctgcacaatgaataaaatcttatgctcccacacagcaggtatggaccctgggaaactctaattgcatagcacgtcagtttcttctctaagaggacatcataataatcccaaacttttaggggattaacttgcaatgtggattaaatagagcaatatatctgaagctctctgaagctctcagcacagtgcctggcacatggttagctttaataaatagacactgttgtcactgtcactgttgcctgatcacatgtgagccttttcaacatcttccttccctttccctcccccccccccgcaaggtgcttccactcagaattctaacactgtggagccggagaagcaggtcgacaacacggtgaagatggctggcgtgattgctggcctcctcatgttcatcatcattctcctgggggtgatgctgaccatcaaaaggaggtgagtctcaacactgccgagaagatcctgctgaccccagaagacccagcaccaccatgtggccaggctgttgctctatcagttatgtccagtagcgctttgctgatagaaccctggacttctctgtgctagtgtttaagagagatgtgttgcctccttggcaagggggctttgagaagagcagcttctaagatggtcagggattcttatggttccctggttgtgctgcggagtctggttatgatgaaataagtcttcttggaattaactactctgtgtgactggtgatgccctcgagatgtttggggaactccaggagcacagatgaacacaaggacgtaatgctctacctttctcacctgcatttccctctatccaccagtggagagcagcctcctgcgctgccttcaacatctgcgaaggagtgagactccagagacttccctacttattcatactccatgtctcacccgactgtctcaactcagtgttactgcttagtattctctttccttgggatttttttcttagactcctatgggcaactaatacagtttttcatatgttgtatttatatttattttaaatcacattgttaataagagcacaagtaccaatacttcctttattcccaagattcaaactcccacactcatcttctgcttaaaattcagtcacaggattgaagacaatacacaggaattgaggagagagattaaaaaaaaaaaaaaggaaaccatgagtgtgagttagcataatgattagggatgattgtatattcctcaaaactgggtctcctgagcaaagtctctctttagcctttacctgtaactctattggcacacttacttcccatatatatatatctgtcttcttggtttcgcttttagactcccatcacagcctccatcttcccactttgcagccaaagctaagaagccatcatccatgttatagtaacagctgttggagtcccaactttctacaacaaatgtagtgattttcatgtctctaattataccctgagaccagagctctgggtttggttagctatggagttgaggaccagatcacactaatgagtaggaccagggaatttctatcatcttcaagttgcaagacacttttgaaacttgttctcaagaggaaaaaaaatgcccccaaagacaaatccacactctactcaaggagtcacaggagtaccaatgaaaataaaaattgaaagccaatgtcctcattcccagctgatgatgcaacaatgctggcactggcatctcagctatgtagccatgagtacatctttccccctctctctctctcttttttcaagctttgattcagccagtcttctttctcaccagggtatcttcttgttagcacttggccttttgttaatataatttgtctaaaaccatcatttcttttctaaagtaaccagtggaatagcttaagagttaggattctcaaccagctatcgattttcccactgaaaaaaaaatctcgagtggaaggaaggtgctatgttatcactggggataaagagactccagagggttcacttcactgttatctcatcatcactgataaaacgtggccatgctgtatgtcccagccactaatcaatcagctgccattatctgaggtggcgcatatgctttgagttctctgggagtggtaagcatattgcacatataagatcactgacaggtttcttagccttgctggtgtgttagaggcagaggtgaatctgggattgtctacatgggagaagtggccaatttaatggagttgaatatctttgatagacctgaaattttctgattctttgccactgatttgtaagtcagataggaacttccaattttgctctttctaaagcctggcttaacctacgtcaccatcgactgtgagcttgtggggaaaaaaaaaaagcttcacttccttctcagcagctatttttgaaatgtgtgattttttctgggagggaggaaagaagtggttttctgtttctcgggtgagagcacatataaagcgagtcttccgtgtagatttaacctcttccgggtatctttatcgccccacatgtctagaaaactgtcagacacaaccaacaggtatcacgtgatcactatttcacacccttcccccgagcaaatttcagaccctatagcaatgcacagcttggggctgctgatctgtacttacatatgttacatatatggacatgtttctgctggtagaaaagaatatttcagagatgggtgaagtggggtggggttggggtaaagaagagtagaggagatttaggggcaagaggagagaaaggaagggaggaaaggtaaggcaggaaagggaaataaagaagttgagcttgggtttgcttctttctactaacctacagtgtttcccaatgactagagatgcctggaggacaaggaaggccccagtgaactcagtccttctgtgggattctgctgactccagcccaatgcatcactatgggaacattagccaatttagtacactactggcctgctgctagccaaaatgctacctgtagcacactgaaagagggacattttaaggaacaggaaccctggaataataagcaaatcactccaactcaggagtcccactaccacctccagtctctaagtcctgaattgattctaccataggtctttcaaggctatagccacagctgtgttttcataaacacagttgtccctagattctccctttcaggggttcactaccactggaaggcttacttgccactctcctctctgtctccttgctaggaagttcctggataacagaactagccagcgaatgtatttaaagtgcaaaggatataaagggggacttagtgaagaaattaatttacatttgtataacttaagaaaggaagcaaaataggaaggaaaaagccaataaaacgtgacaaatgttttatgatcttaccttggccttgttttatcctggagagagggttctttggagctaaaagtcaaatactgttgtcaatgggaggcttaagtaagttcttttatggtttccaaaaggctcaagttaaagtttcaaattatttttgaatcactcttggctgatcttctttgattgtggtgcattataatatgctaatataataataagcatatgtaatctgggcattatgaaaagaggaccctaagcccttctgacacaattgatttccaatgtggttttggctatgctcgctgaaaactacccaccctttattctatcattagtgaattattctcttttgcttccggatctaccagactgttccagaagggatgatctaagacagacaccatgctattacatagtaacacataccactttctttctctttcttttttccccctgagctcctgatgatgagaagtcctcattgctaacacctctatgcagtccagagttcatcctacactttactttctccctttagagtccttagactgtctcctccaaagaagagcaagcaagagattgcgaggctgcctaggttgttccttacctaataccatagagcactggatattctttatgcaaactaagatacaaagctcaagtcattagccattcccataaagaacctctacaaattagtgtttgttgggtagtaacatttcatgcacaagtttaatgaaggtcagagtcaagctgctttgggattttcttcctggaacctgagcatggaatctgttgtagtttcctttatgttgttgtgattaaaataacaaaacaaaaacaaaacaaaacacagtctaaccaatgcaacttaagaaaaagaaagctttatatcagtctacagattacagtttatcattgagggtagtcagggcagaaactcaagcagattcttgaaggcatgcttacttacaacaacaacaacaacaaaaaccccacagaaacaaaaatcaaaatcagcaaaccaaaacagtaagataaaacatgccaaaactaagccaaaactcaccaaaaaaaaaaagaaaacaaaagcaaatacatggagtttgttttgtgttatgtccaagtcttacaggaactattcagaccttgttctttatacctacgtacggaattagaatgctttacaccaacaggaatattcaccttacactgtagcaaatttattccaaaactatcatcaatgtgctaacagcaatgctgcaaatgacattcacacactgacctaatttcttcattccacttaaactgcagagtgttgggattgtcactgtcacccttctaatgatcgtgtctcatagaactgatggcacttctattttgctcgtgttttgttcttaaaactggaaactgaagctcaaaggggttatatgagttggccaaggtgctgggatatgtttagaaataaatccagactgtgattccggagcccaagatgctaattttcaccagtcctgaatgaccaatagaaagcaagtgaatcatagagcaggaaacaggagctttggttcaaatatcactttccctctcttaattttgctatactcaggctttggagatatgattctcccaatgacatatttctttacctacaagagtcttattagtgtcaaatgttgacccctacccctaagttcttctaaatatcactaccaagtatgatggcctaggaatgtcttcccacattcctaccccattgacaatcccattgtcttcctagtgacagacaatccattgcatgcagcccattccccatattgccggctcaagtcttcttctgggtgtttatcacataacctggtgctgaagaaagaagtagcccatgagaaaacctaaatataagcaaaagagtgagataaactggactagttaagagagcctgggcatgttattgagtaagtttgtgtgtgtgtgtgtgtgtgtgtgtgtgtgtgtgtgtgtgtgtgcatgtgcgtgcgcactcatgtgctgtatgtcatacaactgaaacagaaagtgttaggaaattacccaaagtcacatgactatgtgacagtaatgtgtctcaaactgagtacatctgatatttaagttcatacatactcttttcaaactcttaaataatattatctaccctagattaaattgggatgcaaaattgtgtgccataattttgaaagggtcattgaggtgagaaacaaacaaaaccaacgaatgaaatctgtcatcttggacctaccctgtgctgaacagctgcttctcatatactcagcgaacaactctcccatccccctttctatttgtgcttataccaagtctgggtgcttgaaagcctgtttccatttgcacacacttagacacctatgactgtgtatcttaagcttctttcacatttcccttatttcccatcccatgattattgtgaagaacgtgccccacatctcatcttgactcttgttttatctttagagaccactgtcccttttccctccaactttctcttcacacgacccttatgatcattcatctagaacaaatctctctccagatgactttttggctttgcctttaggacagagacaatgttccttttcatatcgtgacatttgtactttactagtcacccacttaggccagaaaacaattccatatacctgaaaataaccactcacaagcctggcttctctgtgactttatcattcaaacatggaaaaaaaatgtagcccaatggtttgtgacattggctcttgaactaagatggccaggactctaacacctgccacactacttgccagttatgtaaatctgggaaagttgattctttgaacctcactttccttgtctgtaacataaggataacaatgtttcatagggctatggtaaggatcaaagaagtagtccacatgatttacttacaatagtatctggtacataagtaatactctactgtttaagtagtagcttttttttattacatttaactttcatttttcattccttgagaatttcacacaatgtatttgatgacattcacccttccctccactgttcacacatccaacataccttccctacccacacaactttatatcccctttaaaaaacaaacacatcaagtaaggttgatgctcctcagatacccttgcatacgtggtcttctactggaacaggttagcccatcagggactatatacccttaaagaaaacaaaactgattttcctcccagcatccatcaacttacaacatctcctcatagagggcttggactttgtgcccactcctccctctatgctgagattatatctggcttgagctgtcatgggtcttgtacatgctatatcatctgctgagcatttatgcatgcaactgccctgctgtgtcctctgtttctatcaagtcatctacctcctttgggtcttacaatccctctgccacctcttctgtgatggtcttacactaatatctgatacataagtgattgcattgtattaaagtgctatctattattattgcctcctctataatttttcttgcctggctttcatattagaccaggtgggctggattagaatatcatttgtctatttaaagtacttggcagagacgggtatattagtagactcccaggaaatttttttaattaataatgaaatgatgtttgaatagataatgaatgtgctgttggatggatgacgggtgaagtgagtggattaaatagatgaatgggtgggtctatgccctgaatggatagatagagggatgaattgttaagtggatggatggatggatggatggatggatggatggacagacagacagataagtttatgggccagatagatgagtagatggccatatgtgtggttatatagacaagtcagcactgttaaaatgatataaaacaaagagaaacccgaagccagttttgtcagctagctaaaaaggtgattctgcagtatttgatttattaaatttggggatattgtgtttttccttttctttcctaagcacagctgtctttgtgttcaagagttttggtttcaggcaatctgttatctgcagtatcagtgtatccttgtaaattcagaccttcagtaaatcttcttcaaggtttagagaatgcacacatgtaaactgtgttatggtcacagagtaaatgcctgtaactttgcaacttgattgagaaatgattgcccgttattagaagaccacagaccactaccattctagaagtttctttgacaacggttcaaagacagcactagttttggtgacctccacgataactcaggagaaggtttctggaacaggccatctatgtttgaatgggaagaaacatgttgttaggatgaggtggccccaaagaagttaaccttgaatgttgagagcagaaaatagagaggaccagaatattgaacacagtctgctccctaaaagggagtggctgcagatttggaagaaacccaaattccagtatctccacagatggagagtctgtgaggggtgccttcttaaatccttgggctcctcaattaaaattaatagtaactttgtctgcttttgtaaggaagattcaaatagatgaggcatgggacgttgtcaaggttggtctactcttggtgccccattttcttatgccctcaagcagtgtaagctacatggtggttaagaacatgacctttggaaagatgatgtcatcaaatttgcatactggttgcatcatcttcaccacatttgcctttgtttcttcttctgtaatgtgaaggtgataggatccttctcttcagacatttgtaaggaatatacaagttaatctgtggtaaggtcatagaatagtgctggtacctagtaaattttatattttaagtaatatagttatatatattgtgttagtattatgtatatatgtgtatatatatatatataattgataactatttttactgccttcattatcttggtgatgaaagaaagaggcaacaaattttatatctgtagatttttcatctatgcttagcctattccaaatatagattagtattaactaatattaatttagcataatttctgaaaaagactatatactctgttttatattatttgaatataatccaaatagagaaatctgatgtgaatgaccacatacccatgattactcttaggagtaagcagtcactgcttccaatgtttgagttgaagaaattggaacaagggcctacataattacttgctccaggctactccgctgtaaatggtagtaccaacatgttgcagcttcttgtatttccatgacccaaaagctatttgacgtgtctgtcatctgtggcaacgacttagtacaaggatcaggaaacaggttgagaggaggagtctgcttgtctaaaatgtcacagtaagctgaaattgcaacattagcctctcgcttctcaagttgcttgatatatgtagaagaattaatctattttattattgtagcaaaaggcctgagatggggtaagttataaagaaaacaaacctattcctcatgcttctgggtagatccaacagcaggctgtcagcatctgttcttcttctgcaaagggccatcttgctgcagcagcacatggttggaacgtaccatcctgtaaacagactagctatgtattcctcttctttcaaagccactagttctgatatgcccctgaccctgatgtttccatctctgtctccacctctgtctccatcaacttcagcaggtctctgattgcatcagcacatgagttgggggggcagggctcaagttacactaccagcttccaaggagacattcaagtcatagcaagagataaccggatcccgagctgcctgcttctaaagaatagcatttcctggcactgcatcagctattggtgaagcagaagaatgaccagtgccaaccatagctagtgaatggggatttgatgactcatccagtttccatccatcacagaccttggtctttccatttcattctcgagggccattattcatttggttgaggattctgaaaaacttggactggggttggaggaagcagggagcatcactggatcttgatctgctttgattcattttccctacctcagcatactgagaaagcttgattctttatgttttcttaccattcacttttcttctggacttttagggttattggttggggctttgctagccctgccttgggggcttttgctacttctgacttgaaaggtagaaatcctgagctctgaatgtgtgtggctaacacatctctgtggctataaagactgaatcttcccttgacaagcaaatgggataataattgcaattaggaaataattcaagaggggagggcactcttcttgcttactcgggaggatatttgggaacctgaatttcctagcagttttttcatagtcctcaaatgcatcacaatgtagataaagctgatatgaaataaaacacatccctatttatttttcttacagcgtaagataaattacaacaaagggaatttagtggacatacataaaagtttgtgattctttagaagccaagaactagtgaggacattagggaaagcctgaaggcagccatttttcaagcttccattcaggagcctgaattcttagccatgtgaaatgctacataaataaaatagatactaatatcaattctctggctttggtgactagtagggggccaacagacccacttttaggatatcttccctatggcctctctgaagaattcctggaatcttggaatacagttggaaaaatcattggcagtagatagaacatagagtcacaaactttattcaagttaggagctgttgacactcggggctagaatgcttctttctcagtacattgcttcttcatgatgttaaactttgccatggtcctactatgtaacaaccttgaaagtctaatgatgtaaaaaattattttttattttgcccggggattcactctggatgggacataaagaaaatgacatatttctgttctgtgacactcatggtctcagctgagataacttgtttgaattctagcttgggctggaaagactggaaagtacctggtcattcctttctctttgtgtaatcccagagcttctccatgtgttctcttcagcatggcagcattggcaaagttgaatttcttacatggaaattctggcatccaatagaggggtccagaaaaaagaaactacaaaacatctttaaaaataatagcaaaaaacaaataaacagaacacctagcttggaaatcccagactactatcttactacattctgtttgtcacctaggtcatccatgactcattatttggggtagatactacacatgagcctgggaaatgtaaatggcaggagagctatccaggatgctgcccagatatttccctgctttttctgtgacctcctctagaatagatttggaggcaatctttcctgatgaaaggcgctactgcgtctgtgtcgttgcttggatcccaggaatactgcaatgtggaagattggtaacctatttctaggcttccatgcaaagcttatctaagacattcaaaaaatccataattataatgaagtttgtttgatctgtctgtaaggaagaactttaaaacagtacaaacagccagcaccaaacgtggcttcctctgcgtgagatgatgagtctctctgtcagaggtgaaggtttgctcgcttcttccatcactaatagcagctgacgtttaagaacatgcatctccttgaggtcagggttactaatatgatgtgcatatctaagaatcacgatttcatataaatctaattcttctttgtttgtcttttctttttcccccttttggacatttccttcatctgactgcccatcaatctatagaagaaatgcttattcgtactcctattacttgtaagtatcgagccggtgttaactttgtgccccagaagggagcctgtagcatgcacttcctcctgcaccaaccgattggttgtctgttggtttctcatatccacctctgtctagtcttctgtagtctggaaggttttttattttgtatggatgcctttctgtttgaaaaatgcgctgtcattgttcctgtctattctgtttctgtcatcctgatttttccctcgcacctttgaaggtgtgaggggttggttctcctttgtgagtgtcagtttctaactagcagcacctcagttccagcaggaggggaaggtaagacagaatcacagatctcgggaacttctgggtccctttgtgcctcttcagggaagaagtagtcttggggacttaagggataaaaaggagtccattggctctttctgatgtaccaggaagactacagggagtcctgactattccaacctagcatcaaggatgacagaaacatccaaggtcttggctttcagctgaaattccctgtttggcttttaacattaattatatcactttatccatacattttgttcacagctaatgatggctgctgacttatcaactttttacaactcactaaataaaagtgattttgacatcaaatcagagcttttcaaaacacaagggtaaaggagaagaaactttaaataatagatccgtcctgaggaacatttggaaaaccactgaaatactcccatattcccaacgtgtgtctctggacttggaacatgagaaatataaaatagagaaatttgaaaacccatcacatattcagctagcataaggataggaccagagctcagaatgacaggttcttagtcaacagtattgccctccattttagatcttcccttatccttggcaaacacagccttgtgagaaagcctggcctcacagtagcctctgctgaaacctccccaggtagagatgaagacagagagtggcttcctgatccatcctgctcagttggtgtcaagctgtgaacagagaaaatgataccaccaccatcattcacatagggaccaatgccctccaccactactgccaaaggtcctagaagctatgccttacctgttcacttagcaaacacaccttgagcattgagtacacacactgtattccagttagggagaatgcagaaataaggaccttcaatatcaccgtatggtgttcttgcctgtctaagagatcagcgggagcaaataataaaataccatgtagcagtttccatttatcactactcaaatcaatcctggcagtggtggctgcacacattcctcactacccaccccagtgttcttggttctcaaatgaaacacacacacacacacacacagcctttatattctaatatgcttttagcagctcaatggccaggctactttctaacctccacatggctaatgtactcccctctgatattcctgagttattacttactaaaatctatattccatctttgttgccctagatccagtggaggggggctgggactgctcttcgctggctcttacatatcggctatctctgttctgtacctcaggcataatgtctcctctccttccccggcatggtggccaactctcttcctgctccttcctcagtcccttgcccagaaatccaaaagtcctgcccctgtctttgcccagccattggccaccggcaactttatttgccaatcaaaactaactggagcagggtacctcagtgtcttatgtgcaggtgtgcagattctcgtgcaattttggggaccaaatttatataatataagcaacgttaaaccaaatccacaacaataccagttaaaaaatgatgtatagtatagggacaccaaattaagtataagcttattaatgtggatggatacacttaccagtggatttaaaggtagatgtatccaatgctggagaaaaatgaccattttgattggtctgaatggcattttcaaagctgtggacatacaatacaatgcatctgttctgatggaatgagtaggaggtttaggatttgtgtagttttatactcatgtcttaccttggcaatgttcctagactccaagtctcatttttctggtactaaagggaaatttcacttaattcacaaacttgccttcaagagagaatgagatgatttggtaaagtatttctgctcatgaaatattaggttttttcctactcctttttagaaagaggataggtttgtgacagtaatgatggcccctgggaggtccgctgatcttacaagggttcttatgcaatccatagtgggtatggacacatactaactagcacaaattctgtgtatatccttaatctctgggttagctggtctacattacatatctagacatggattctctgttctttgctgtgccggtacctgtgaatcaaagatgaacagttagaagtattagaggcaggtattcaaatacttgtagctcaagtgtgacaatgaataacagactttcaattggtatgaacatggggttctgtgtgatatgttttagaacatgaaacccaacaagacctaggacatgaaactcaggcatgttctgggaagcatatgcatgtgcatgggacatgatggttctctgataatatttatacatttatattcatcaatcccaaagcacctgttgtgtgtcactgtaaagaagtctctgcagtattttgccttccaaagagaagctgtaggtagttcggtttttcctagggcatcatctttccatacctaacctccagaaaatacttgctagcattgaagtatttgagcaccaaagaacctgaatggataagggacacctaatcttcctgagtaggagaaaccactagtatataacaagtatctgtgcataattagtttactaagtccccatcaaagtacagttttgtaggcaagcctttctttcttttttttttccattttttattaggtatttagctcatttacatttccaatgctataccaaaagtcccccatacccacccacccccactcccctgcccacccactccccctttttggccctggtgttcccctgtactggggcatataaagtttgcaagtccaatgggcctctcttcccagtgatggccgactaaccatcttttgatatatatgcagctagagtcaagagctccggggtactggttagttcataatgttgttccacctatagggttgcagatccctttagctccttggctactttcactagctcctccattgggagccctgtgatccatccattagctgactgtgagcatccacttctgtgtttgctaggccccggcatagtctcacaagagacagctacatctgggtcctttcaataaaatcttgctagtgtatgcaatggtgtcaacgtttggatgctgattatggggtggatccctggatatggcagtctctacatggtccatcctttcatctcagctccaaacgttgtctctgtaactccttccatgggtgttttgttcccaattctaaggaggggcatagtgtccacacttcagtcttcattcttcttgagtttcatgtgtttagcaaattgtattttatatcttgggtatcctaggtttggggctaatatccacttatcagtgagtacatattgtgtgagttcctttgtgaatgtgttacctcactcaggatgatgccctccaggtccatccatttggctaggaatttcataaattgattctttttaatagctgagtagtactccattgtataaatgtaccacattttctgtatccattcctctgttgaggggcatctgggttctttccagcttctggctattataaataaggctgctatgaacatagtggagcatgtgtccttcttaccagttggggcatcttctggatatatgcccaggagaggtattgctggatcctccggtagtactatgtccaattttctgaggaaccaccagactgatttccagagtggttgtacaagcttgcaatcccaccaacaatggaggagtgttcctctttctccacatccacgccagcatctgctgtcacctgaatttttgatcttagccattctgactggtgtgaggtggaatctcagggttgttttgatttgcatttccctgatgattaaggatgttgaacattttttcaggtgtttctctgccatacgggcaagcctttctaacatcacgcagcaatgaaaggggtggagaatagattgagttggaaagagaagcatccatggaaggaaaaaatggctgggacaaaagaagataaatatgaccatagatatgttaatttgaggaagctggtagaattcccaagtaaaaatgcccaggcaaccttgagaatacagaagtagaatgtagacaggaagaagatatttgtaaccttactctgagggtgacaggggagaatatggggtgggacaattaaaactcaagaaagaatagaagcaaacagagtgaagggccaaggctcctgaactgagcatccttcacaatccacaggcaggagttagaaggtgaatgcaggatgataaagcaaatagatgatagaagggaagagatgtcactacagaaggagaggtaaaaagccataaaaaatggtacagaggacagaggtggaaggtgaggggacagtcagtgcattccaatacgaaaaatcacttgtatgtgttatgcactaaatggtgggcatgagagaggctgaagatgttggacatccggaaactatggaaagggaggtctggaggcaagctgtttggagacaaagaccagcctagaagatagaaagatgagtctggatcattggactaaaaaagacaaggcggaagaaaaaggacagaagggaaatgggtcagcaagatggctcaccaggagaaagtattcactcgtaagtctgagaactcaagatggttccccagaacccacagtagaaggagaaagcccactcctgaggttgtactctgacatctatatgcatgccaaagtatacatatatgtctgtactcacacacacataaataaataaataaataaataaataaataaaataaaaattaataaataataaaaataaaatcagaaaaggctggaagacagactgacagtgatggtctccacattccctcctctaagtgctggaatagatcctcagtggaagctttgaacccccatttttcaggacataaaccagcaacttcagcaacaggaggaacttgtggcaaatgcagccacaatctagaacccaagtaatgtcctgaattggaacctgaactatggcaactccctttgctgaattgagttcatattacactttaagaagcaataaggaagccagaagcccagttgtcccatttataacaaaagaaaaaagataatattcagcgcctaggaatctagaatacattctctctaaaatcccccaaatggtgtgtgtgtgtgtatatatatatatatatcacctctgttgtggtttacctaaacaatctttactgtgaaaccaatgctaattcactcaaaaaaaataatgaagagcctactatatgctggactcctgccaaggttttaggaatttaggaataagtaccaaaaagaaaaagaaaaagaaaaagaaaaagaaagagaaagagaaagagaaagagaaagagaaagagaaagagaaagagaaagagaaagagaaagagaaaaagaaaaagaaacacattcactaatgtagaaatgtctaataggagagagaggaaagagtatatagcataaaaatgggatgaatagaagctaagacaaagataaataaaatagacacatgataatatgtagagtgtaagaaatagaggaacttctatagcctcaaagcaaaacagctttcaagtactcaccttcattgaaaggagatacacacacacacacacacacacacacacacacacacgaccaaggttctcaagcattttctagaagggactagataataaaatttttatctttctatttgaagtctataaacaataatagataatgtatggctatcttccaatagaggccactaaacagagcaaccaaagcatcaggcaatggaccattgattgccagtccctgtcctggacttcatgagattcatcctgcttttctgagctcctgctgtgtgcaacatactatgcttggtgttacccatggaaagtggaatttggtactttctaccaactaacaaagggtggaaatgaaaggagcttccagctgatccctactgtgtgccaggctcatttagaaggagactttgtgagataggaatcatagcctcatagtttcattcagatgtcagaacccaggtttaagatgttttttataactcatagaccaaaagcaaagcagtggggccagactttgaactcaggtccacatgaacttcaaactctgcctgttcttctcaccaagcccccattcttggggagaggtaatggcaagaacaatgaatagggagcctttgcccagggttcaaaggcaagtctgtctatgtagaaggcctctgaagagaggcagaatatactcggttgccgtcagaactaaccagggtgttggtgtgagattggccaaaactatctgtgaccaggataacaaaggagacagtacaagcagaactgtgaatctggaaacccagggacacaaagaatttaggagaacatatatgcatgcatccaacacacacacacacatacacacacaagacacacacacacacacacacacaggtggaaatgacatgtttggatgtcacactagatcagcattcttgatctgccttccctatcaagttttaacaatcctggatccactgtgagcctctgtcccttcatgtacaagatggtgacatgacaatggcttcccagcataattaaaaagtatatatatatatgtagcatcacatgataatcactatcggtagggattttccaagtgaagccctcattccttccattctgagctgacacaaatgctctgtggggttcatatttgcctttctatattaaagcagctctcagcaactttagctgttcactgtttgcctttggataggctattaagagctagcgtgtgtccacaggttaatttacctcagagtatgtgataggcacagtgattattctgaacagggacattttagtcaagtaagtcttttaaaaagtcactgagaatttacccactatggtggccaggagagagcagtttctttggatgtgtgctttgtgcaaacgtcatagaggtgggagatggccacctagctggcctgttgaaggcactatatgggagtcctggattttttttatatatttcctgtctcccaaattccagtgaatttctgtatatattctcaagttctagaccaaatgctgcctccactgagaagcctttcttgattctcagactctttaagaataccctcctcccacttctctgcattccattgcactaactttgtatgaatgtcaggagaatgtacatcttcagcttgcttctctttcatgagggcttatctctctttggtctctgttcccctggcacatacagtgaatcccctagtaaccacatatatattgaatgaacaagatgaaatcaaacaatataacagctaaagttaaaaataaacatggtgtcatttttttaataatttatattttccttgccttttaattctgaggcaatatttactcctgtgttcgcatctgtgtgacctaggcacatgatttcatttacttagtgttggtttcctggtatgccgaacagggttttaaaacacatagatagtcaatagaaaagtgtttgtaaaatacctagttcttggtagggcctttaccaagatataagaggccaggttcttctccatgatgcctatgcctgtccacgctccataaatacctgttacaaatcaggtattcttgccacagcatatttaaggaggcatttacaaatgattatgtcaagagatgttcaaaaatcattttctgtaattcatcagtccttttgaattaagacaaagaaaaaaaataggggtagaagaaaaccatgcaaggcaatcaataccaattacccagagctgacagaaaacatgctgacaagtgaacagccagggcataatcacagtctaaggccaaaccaccctgaaggcaattggtctcctccaatactttgccctgtaggcaagacaaagtcagtactatcactgctgattcataggccctagcccagctagccccagtctctttgaaaatgcagccttctgtctgaactggggctgagggaggttcacagttgaacccaagacctcacacatgctagacaagggcattaacactaagcaaccccatcttccttttcacgttttcttttttattgatcatttattcatttacattttaaatcatatgcctcttccaagttaaccctccacaaaacccccatcccatcctcctccccccccccacccctttgcctctatgagggtgctcttccacccactcccctactcctgcctcactgctctagcatccccctacactgaggcatcgagccttcacaggaccacagaactcccctcccattgatgctggataaggccatcctctgctacatatgtatccggagacatggttccctctatgtatactctctggttggtagtttagtccctgaaagctctgagtggtccagttcgttgatattgttctttgtatggggttgcaaatccccttcacttccttcagtccttcctttaccttttccattggggtccctgggttcagtctgatggttggctgttagtatctgcatctgtattggtcaggtcctggcaggacctcttgggaaagagccatatcaggctcttgacagcaagtgattcttggcatcacttgtgttggggtttggtgtctgcagatgggatggatccctaggtggagcggtctctagatggcctttctttcagtctctgttcctttttttgtccctgtctttccatttctgggttaaaaattttgagataaatgggtggcccattcctcaactgcaggtctatctcctggagttggtgtctaaggcagggtcacattaaattgctagcactgcatttgagcatacaatcctcctatttcaacctcaaaaaatatcttccctcatagtcctatgacaccaaagccttcctgactcagaatttgcatagtaaaaagcatcttagtttggtattttgtatgatgactttgagagaactctcctgacatgttcagcactcgggtggatgtgtcccttccattggattgtgcctttgtccctgcagtgttctccctagaatactctggccttgtgtgcctagaaagttccaatgtatttaacaaaggtcaccccttttcttatggtggccttctccactttccatggatcatatccatagactgggctcgcatctttatgaccctcatctctcatgcatttacctgttaactcagtcgtgatctgcttaggtaacactctacttagaacagctgcaggcccatcccctactatactgttcattatccagttttcattgccctacaagtagctcagtatgcagaccaattcagacatctttatgagtggatatctgtggtgggtatccctccatgcttgttttatctctattgagttatatattatttgattcggcatgagttggttaatatccatttttatttattttggcatatgttgatggtaggctttcagatcactgtaggctttatagttttatattgaattcaaactagaaacattgtattcaaggttgcatgtcacaattataaatgcatgaaattaatgaaagctgtcacagtgagatagatataaatgcagtagtctagatcctgtgtacagataaatttggtgagggagtgctattgaaggatgctttattgtttacgttattggattagagttgaaccatattagtcatgaataccaaacagagccaatctataagccagagctctgtcactttaatcagggaaaatacaaagtaactatttctcctccagagatcagaaacgatgtttattccatactttcaagtttacacctaaacataagcttccatgccaaccaggtattaatgatgccttaaagcatataaacatctggctaggcttctaaatgtttctactctacaattgagtttgaatgctacaaagatgataaagggaaatgtgtgggctgtctgctgatggagaggagtatctgaaatgtgggtagagaagatgctctcatgtggtcaaatcctcagatcccctttctagaaggatggtcttagtcacccagaatagagacttctggactgtccttttcaggactttctgtttgatgttgcccctccaggtgtatctagtagccccatggggtatatagtagtcaacatagggttgtcaaagccaccctggctcccatggggttgctttaagtcatcactgtgactacatcactatttgatttcttctaccctcttcttgacagggcaagcctgtcagtctccctgagtctcattacaaaacactgtctgcgccactcccattggctcatatgtaatttggccactagagacaaatgggtttaagtatgttctgtgcctttccctagagcatgctttcttcatagcctatgagcactttgtgaatcagccaattaaggtaattccttcctccctcgtttagtgggtagactctaaagaatcctttcttagataattttcttcataggcatttgttgtctgtgctgatatgaagaccatggagccattgctatatagccctacctgagagagatccaaatatatcccagatgagactacagaaatatccttttgttgatacaaccccattaaacctccagtgtcccaagtactcagtcatagcatcagaagcaggtttacttctgaaaacacttcgtataacatgcctcttcaaagtaagacatatatacctgcagatagagccttaggaaagatagaactgtgggacgcacacactgtaaatgcctttcttgatattttaccagagtgcttttaatggaaggaagtgcttaagttaagccctgagatgcgcctgctgatggtaatgattacatcttgtttgtgtataatgctttatctctaccaaagtgctttcccactcattatctccttgtctggttgggtttggaggtatttagcaaggtattatgagacagatgatagagtggagcagaaaagagccctgggcattctggctctgacgttttagagacatctttaactcccatctctggttctatttctcatccgtaaaataggagtcacagagttatttcagaacagctttggagggtgagaccatgttctaagggatttctttcctttcctttctttgatgacttcatacatgagtactgggtttatatattgtttactccttctcccctctccaacttttcccatctcccctctattccctctcattcatgaaccttgttgttgttactattggtgtgtgtgtgtgtgtgtgtgtgtgtgtgtgtgtgtgtgtgtgtgtttgcacgtgcgttaatgaacactgctgaattcacttagagttgctgctatatatacgtgtttagggctggcctcttgcaattggacaactaatcagaggctcatccctggagaaaacaaattctccctctcttagcaactgtaaacttcctagagcttttcatctagtggtgagtcttgcccaggttgacatggtatggtgacaggtgttttgacggtgcaggtcttgttaggcaacattgttgggatatcatgagtgtggcttctctgtcacatagagaagacactatctaccaagtaatttccttgtgtcagctacagagctaagttctgagtaattagttaaaatgctcttcttttgaggagtttacagcttaaaagggacatgggcatgtcaacaaatagttgtaaaataatgtgctaaatacatgaaagaggtgtactgaaggtagaaaggggaggccttcattgacaactgtgaggaaagatcttgtggattaaatgacccaacaacattttggaaatatttttaattaaaatagaattacatcacctccttccttccattttctccctatagcacctcccaaatacctgccatcaacccttccatgcttgcccactcttaaattgataaaactaatcaaaacaacttttggactattatgattacatgtatatgtatgtgcatatataatatgggcacaaatacataaagacaatctgctgaagtcatcttcgttgtttctgtgtgtttggtctcagggttgaccatttgtagtggataaccattgagggccacatccctagcagaggccctttctcctcttcccagtcatcattacttgctgtagttctttgtctaggagtggaaccccatgaaaatttccttcttatacataaacgtgtcttttggtgttggcattaattcagcttattcacgtagccatttctaggagagactctttcaaagcagctttcctagtattctggcttatacaattactttccttcttgaccataccatcttcaaatacaggcacaaactcacacctttatttttcatagctggttttgtggcatccttggggtaaaaagactttgcaaggaaaataaaagagtaagaaatgaatggagaagaaagggaaagggggatgaaaaggtcagagaaaaagtttgaatcctagttttactgcttagcagctgtgaatcccaaacccttgggttttagttttcttatctgccaatagcactgacagtcctccaatcaacgagctatgttaagagattacgtattacactacatattcagggttaataccactagaaattagtggaactgtagcaccaactattgttgggtttatctaagaaagaaatacaggggaacaaagatgtagaattattgtagatggtggttcttatgctttataaaaatctctcctctgagaaatttgtataggacacctgctccccaggcatccatctgtggtgacaccaacaagagagatcagagacaaattggtgactctggccagaaacatcagtttaggcaatgttatttaatactaacagactctgtgtatcagtaggaagaagaaaaggctgcagttggcagtttcatttctaccacagctaattgcaaatacaggtactgaggtgtagacttgttctgtatgatatagctgtcaaaaccttccattaaaatgcaagtcaccacaagttaggaacatagggctttcatgttctattataaaatgcctcaccagacacatcaccaccttcctggggacagagcccccgataagttggtgcaaaggtagaaactctagagaataaagttggcagtcacatagaaaggaggccaccatctacaaccaggaaagaagtatttgagatattcaaattcaactagttggtgagtatataaatattgtaaaatctactagcttaattatacctgaaacctgggtagaggaccacccccagttgcaaaagcttgagaattcagcatcattgaagaagggaatttggaagaggagaggcatgacctctatttaaccaaaaccttcccatgatcctctggatctagagagtcatcagttagaatggctttaattgtgatgatggaacatgcatttgacaatcaaagactacagagaacagaatatttgatggtactatttccttttttaaaaacctcattattttttgtttgtttgttcttgtgagtacatatggggtgaggcatacacctgttgtgccatgtgtgtagagatcagaagacaagttgtagaagttggctctctctttctaccatgtgggtcttgaggatagaattcagtttatcagcttggtagcaggtgcgttctgcccactgagccatctggtcaacctaaccatttccttttacatgtgttgagtagaccacccttgcttgtgctgtttataaatgaatagaggtcatttaagaaatggcaatactgtcccaggcacatatttaaattgtatgtaattatttgctgacatgatttcttatcagggtcagggtgccagtataaaaaggaaaggctccttggccatgactagtctcctaggaaacgtgttcttcacttgtatcactccaccagcatatcatactgctgctgaaaccttttatataagagagagagagagagagagagagagagagagagagagaggatatgaatgagctgctctctaaggttttatcccagtggctttgaacccctactcagaacattctaagagtgttgcataagttacaaccacccacgtgctttccaggagcatgggaagtatagtaccataaaaatgctgttgttaatgggagacttgaattcttgtaaaatgtgaaaatacaattttattaagcctataaaccaaattgagcctcaaaactaaagaagggtagctttgtttcagaaaacaccttagcaacaacgtgctaaaaagaaatagagcaaagccaagagaatctttgtagtttgttctttcttccccacaccatttatcatctgggcatcaacaggataagaagagaccttctcataaaaaaaaaaatctaatctcagatctaagctatgggaatagaattttaggctatattttttcttccttatcttttctaaacacaaaaggttccatgaaggagtgggacttaaggtgttgttttactttgcttgttttgtttctgttttttttaatagaagacttcacggtggatattttgaccatattaacatggatatgttcccaagtcactaggatggggaaggagaatatgcttagtatattatacttctataatcttatctctcttcatttaaggatgttgaatgctggttttgtttggacctgtgaggagactaataatcacactgtaaacagccctattgtaaaaggtacaagtttgggttcagctgctagattttagccctccctccacttcttccctcactcaattgttccctccctccttccctccctccctcccttcctgacttccttccnnnnnnnnnnnnnnnnnnnntccctccctccctcccttcctccctccctccctttcttctttccttccttccttccttctttctttccttctttccttccttccttccttccttccttccttccttccttccttccttcctttactttctttccatttttgaaatagaatcttactttgttgtccaggctgacttggagccttaccgccatctactctaagcctctgtttcctcatctgtgaattaagaatagtaatcccaaattttagactcactgtgcagacttactgggacaacatcaatgttttacaagtacggtgcctgggtctcctttaaaatatttttagattaactgacaccaacaaataaaagttatagacatcaggagcgaaatatatgatgtctcagagcttgggaacgttgtgtgttgtttaaatcagcataaacatgcccatcctcttacaaatgggtttttttttaatgtggaatgcatacaccatctgtgtgctgtgcactgagtacactatacatattataatatataatatatatcatatatatgattattatattttggctttatgtctacttctattttcaagatttaaaaaaaaatttatttatgtatttgtgtgtctgtgctcctctctgtgttcccatgcatatgtgtgtatctatatcctgaaaggccagaaaagggtgccaggtcccctggagcttgggttgcaggtggtgatgagccacctgatgtaagtaccacaaaccaaatttggatcctttgtcactgctgagccatctctccagccacattatgtctactattactttgcaatttacaaatgtctttcacataggtatttcatggaacctttacgttaacccgatgagaaaattccattttaaatttaagaaaaggaaggctcacaagactgactagggacaagggcttcctgagaaagagaacacagagatgccattactagtgccatgatcttatgttgcatgtgagatgcatgtgccaaagatcctgaaagagacttctctacatggaaagaacaccaacaagagccacagccttttccccacagagccattatttcagagcccatgtctaaagataacatgcaatgaatacagttcaaagttgcgtctcacctgaaagtgtatagctatggcctcagattataatagaaaaagatacagacagaaaaccacataagatatactttatgcctttaaatacattctctgtataaacaagacaagaaattaaacagagaagtcatttgtcttcttataattgctatgaaatttataatccactgggaaaaataagggcagagattaagagaggagaggttagaggttgttttgtgattgttttccaaacagtcctcttgagtcccacttttaaatgtaatctcttaacacatttcttgtttatactaatgtcctataaaagggttgtgctgtggacagatttgatttaaattcatctgtaccagacacaggagtaactgattatagagtagtcaaatgatgaacttattgaacataatctgtcccaggtgatcttttctgggcaattgaggcttgaagagtatttttttttttttgcttcttttaaataaatacatgatggtgattccacatgttgaaaagaatcattctggctcttgattggggttgcgtaagtcttctcattaactatgtgagcactgcagtctttatgacatcaagtcttcggtctagaaacgtcatttgcctcttcatttgggtgggcctcctttgattctcttttagaagaacacaggcttgtgaactacactacaaagggcagtaggctgggcagtcacaagtaaatatgtctcaaccttgtcttgaactcactgggtatgcagcctggactttttaactcatcattcagtctcaccctggacttgaactcactatgcaagtcagcttgtgagcccaccatgaagagagcttgtgagcccaccacgaagagagcctgatcatgaacccaccatgactcgacttcaacttcctaatctcctactttacctcctgtaatatttagactgcagatttcactaccatgcttagcttcttgcctttattttgttttgaatcacctttttaccatactttttgatgtatagtcttttgtgtgacctgtagatttctgcctgaaagtctcattctttccatgccgttacattgatgtttcgaaatttctgtcctcattgtgtattgttagtatataggaataaaattggtttgcatattctgaaaaacaattattccaattgatttaacgttcaaaagacaaataagagtaagtcttaagtggaaaaataacttacttcccatgcaaaataattttgcatgagagattggttggcaaacccaagccagatgtttatcaaagtgcccagggtatgcccaaaggaagttcccatatttgtgccttcctataggctgtgttgctcttcaaatcagggcccatccattgagtagtagttctggcaattacaactgagtggcaggaaggtatggcaagatttgatggatgtaggcctggctttggaccatggtcccaccatgggctagacatatattcttagcaatcatccatcttcccagatcttcatcttcccggatctccaatgtaggctatgagcagagagagcccagggtctggcacccagcaacagcttattatttatttgcaagaagaaatatgcgaagaaaaaccaaagagctttctgatactggtgatttaacaatggggcagactaactgtgaggtaatgagcctcctggtacaagagaataaagtactccctatctaggatattagaagataccccaagagtcgctccagcagtgttggggtgttttaatcctccctccttgatgatagaaggagagccagttcctaggtttctccagttccctacacatgtgacccagagtcacaaagggctcggaagcagtagggagaaatcatttttggtttgtgatttgtttttatttttgttttccttttaaaaaataaaacaaattcagaccagacttatctttccatcagctgcagtttatgattgcccattaaactcaattgctttctctggaggctggtgttgggacccgtcatctgtagcccaatgccatctattcttgctttccccaagagtgcagacagacaagccgccttcttggtgtacactaattaatttatctcatgcttgtgattttatggcgcttaagtgctggagcatttctgtttattcttctccctgcaaagcatctcacaacgcataaagaccatgaatctccattgtaagccgccgtctgtcttgggctggaaaacagcctgccggctgcctgatgtcttgctggcactgtctcttacagccagagtaacacgtccattaatttatccttaatgacattttgacataccaatcagttcatcagatgttccttttgcaaggcctctcctgcacggccgagccagggtgccagaccactcctgatgcataatacatgagaccagcacaccgctcagtgcctttaacagacagacatgtctgccagtctaagactgcatgttcctaatggcccctgctccctgagtgacctaccctgatgccttcagggcagttgtctcttgcactgcgacttgctgtgcttcaaggaagcttgacagggcaatgatagggttctgtgttcaaaagcacatttgtgatattgctgttttggggaaataaggccagcaaccctttgccccactcaatgggctgagagagagtaagttccagtaattccagcgaatctgtggcaatcctggtagcccacgtttcatcagtatcctggcactacttagaaataaaaatcacaaagctactctgataataatgaatatcaaaaaaggaaagggaaggaaaggaaaattatccctaatgtcttctctcttctatcagccatacacacagatatactacctagtggttgtgattacaatgtaggcatggttttatttttttcgtattttaacttaatgcaacccagttagcatttttccatgttgttacagagttttcatctttaatggcactccatcattttaatagttgcataatattccatccaggggaagtattgtaatttactgagccgcttccctattgttagacatttacgaggctctaaaggattgcatgctattaaatagaagcttcagaggaggtgagagacacagcaggctctgaagactgaagaattgggcttcaaacccacctgctccctttacccagtttatgagtttagaattaactctctggggcccaggtttctcatcaataaaacaaaaaagaactaaccagcacttcatggtgctattatgaagcttcaagctgtttttaaggtaccagccacacacgatggagtctatgaaaaatgaaagttttccatttaaacagaggtactcctggtaggaaaaattccccactctgaccccaaaatatttggcaatgcttatatatcttttcttttttgaaagatgggtttcactgagtagtatggactggcttccaattgggaagtatcctgcgttagtctccaaaggtctgggattataagtgtgtgccagcacacccagccagagacatttttaatgtgatatctgagagtaatgaaggcctggcatccagaaggttgagatcaaggatgctaacaaacattatgtattatctaaaatatctacaatgtcacagttgatagaagtagtgcatatagaaactagagtggttaagagtcactttactgtctatgttaggccctttattttcactattgtttatatttccttagaataaagtctcaagagagtagaagatcttgcttaaaggtatttgtccttaagctcagtgacagtgggaggggctaagtgtggtcctaggtaggaacagaggaaggagaacagagaggtggcatccgttcctctcttgagcaagagatgatgtcctatgatgggtacatctcaaaggacagagcccagtatcttctaggaacttggaaaggtacagatatttagttttaccctagacttacaaaattctaaaactcctaggatggagcccaacccaaacatactagatgattgtgatgcacgcacaggctgtacaagctggggaatccttgctattcactcctgcagaacaaagccagtttctacaacagtacagatgagtctgtcaagtacagccactttgtacagaatagtgtggaatctgaagttatgggaaatttcaaatatggaggctccatccatccatccatccatccatttatataacataataaaagcacttaaaacatggtgctaagtgctcagctaggtgctagagcacagaacacaattagaaactaatgtgtcctgcatccctcctttccagggtactgtgcttctggaaggggctgtctgcagagggcatgggttcttgtggctggcattgctcagtaagggactgagtatcttctgatttgacattacaagggtttctaggtatggtagaggtgaaggccctagggacctttccagcccatataatcgaacatcttacacattgtataaataaaaactgaacatctgggcacctgtgggaccatctaccctggtgtctagcttggcttgttatcatgttagcaagatttgcacaaataggtggtggtggtgggggggacaagaagtgcagacagaaaaaaatagttaccctggtttcttggtgtgttcctgtcagggagcagataaaagtaaaatgcgggtgctggagaaacgcctcagcagttaagaactggctgctcttcccgaggtcctgagttcagttcccagcaactacatagtggctcacaactatctgtataaaggggtctaatatgtaggggtggcatgtaggtgtgcatatagacagagcactcctacacttaataaatacataaataaatatttttaaaggttaaaaacaaacaaaaactctcaaataatgccaaaagaaaaaatactctattcttgggagtggatgatagtgatgacagtgatgatgatgatgacgatgatgatgatttagagttgagtatatgagtatgtgagtatgaggttgtatgtacatgtatgtagaagacctgtcattcctcagatgccattcactttagatatttgtttttcttcttcttcttcttcttcttcttcttcttcttcttcttcttcttcttcttcttcttcttcttcttcttcttcttcttgagataataagtacatgagttctccctttcttaggctctcattggcctggaactcacttagtagactagactcattggccaacaagcatttacctatttctgccttacaacactgagataacaagcatggctttcttttattaactgggttctggaggatcgaactccattcttcctgcttgcagggcaagcactttatcaactgagctatcaccccagacacaagtgactatttttaatctgtacaagtcatgcagtagatgaaaatatatctgattattctacagatgaggaaactcccattacccgcatgaagatggagactttatcatgattacaccaagagttacaacctaggcagctcagaactaaggtcaatactatttccatagcactaaaatcggaaaggctgcctccccagcccaggactttcagagctctgtagcttaaaagcattcaggatagcacccagcatccgaactgtggattctgtcctcatttttctacaaagagctgcttcccttcccactgtttattattcaacaagcatcatgtatagggcgatttctgtcaacagcatgtccagttgtaagtgcttgagaattctttatcaccgtatctaccctggagcagtaagagaatttgcaatattcgacactagttcacacatgaggagactgagttaaggagaagtgagaaactacccaagactacagaggtaggaaatgacagaccatggtttgagcttcagggcgtctagcttgagagtccgtgcctttcccactggacactacttcaggcttctgggacagtgtatctgtccatatgcacatttgaaagtcgcccttatgtatgctgcatgccctctgctaggctggatctatctgagccaactcaggagcctgtccagtggggtctaactgcacttttggtaaaagaagaacctgtttcaggagagacagacatggttaggagacaaatgcagacatagacccgtagaggcagcaacacagagagctagacagcagaaggctggaggtgacaggtggtagccatggtcccttgggcattcaaaccataataagatctgctgttgctgttgctacttgtgtaagtttgccaaccttggaaaagagggatgctccaacacaaagagaggggaaggccccaaagtctcagaataggtgcctaacagaggcagtgggcagacaggatgcgcagtgtgagatgtgaactcgctgcagatatgcacatgtgggtgtccgattgcctgggatgaagggagccaggtgagaaagctgtatgctttcattgacagaagaataacaacaatattcttagagagcatccagacacttgactacctgggtttgagtctcatctctgcccctggaaagtttgggaatttttatgcaatttttttttaagtctgtctgccctgttccttcatctgtgaggtcttggcaatactgttgctaaccatatagttattagagctaaagccctgatacactgtccccacagtctttgaacagtgcccggaataaagaaagcccaatgcaaatgcttattaaatgggcacaatatgtgtattatctattttgttaaaattgtattagtttcttaaagctactctgacaaagtgctgcatgctggatggcttaaaacaactagaatttctcctccaccctggagatatgattcaactagtaaaatttttgctgtgcaggattaggaccctgagtttggtccccaagcaatatgaaaaaagggggtgcttgttggacttgttctcttagcattgccagggtagagactagcgactcctgagcaggttggccagccagcttagcatcctcagcagctccaagccaatgagatgtcctgcctccaaaatcccaaggtggctggttcttgagaaagaacacccatgttgaactttgcttccatacagatcaaacacaatttatattgaggccagcctagcctcaaactcagaaatctgcctgcctccgtctcccaagtgctgggattaaaggtgtgcgtaccactgcctggcttaagattaaatagaattaaatagcatttaaggatggctggtgatttgtggtggtccttggctagaagctacatcactccagtctttgcctgttgttatgtgggatgggagcttactcccacagtagtctgacaaggacgacagtgttaatgtcacactgtctgccactattgtctatgtgttaacgattttaccatccccaactaggtgtaagagagaatgctgtaatacactataaaccctgtgcacactcatgacctctattgactctgagaggatgtagctcagactagaaatctgagttagtggagtttgggttttgaggtttttattttgctgtgtttgtaagagagtggaattgtatgtaacatgtactgaatctgcttttataaaaatttattttcactcacaatttatatatatatatatatatatatatatatatatatatgaaccatatatagagatatatatacacacatatatatatgaatcatatataatgtgcttttcccatattaccaccaccaacattatcctctcttacctcttctccctcctgccaaaccactagttctttgcaataagttcctctcctactctcgtccgttacttttaacggctgacttgcacgaggatgggtgggtgggggttacttaattggggaagaacacttaaccactgggtacaccactgagggttatgacttcttccctccccacaactctttactgcctctcacttctcagagaggaatggggcctcctgaactgtattcccctccatactgaaatgttgcggggatcatcactgagcaggctgagtccaggcaaccactgttgttgtgcattcctgggtgcaacaactatgtcatgtttagaagacggcgtttcacggctctccttctcatctttgggctctttctgctcctcttcagtgatgctctctaagccttggagaaggcaaaatggatccctcagttagggatgaacactcagtactcagctgttcccttccctttgatctgctttgatgctctatgagtctctgcattaactgttgccactttcgacagaagcctctctgatcaagactaggagaagcacgggtctttgtatgtaagcgtaagtatttagagggcactttgttaccttgtccgtgcagcaaaccaatagcagtgtgctcgccctgtggcccctgacctccttctcatgggctggtgatcaggtttacagtgcaaggcaggagctccctcctcgccccaaacctcaatgccaaccggacagctgccagccagccttctatcagtcatcactattgtactggtggccgcaaatttcctggtaggttagtatcgcagctcagagggctcacagctggggaaaacgattgatagcttttatcctccagcaggcagccggcttttccttctggcattataggaaagctagccagcaggaaggaaacttcaagctcacttacagcttgatttctcagtgtcctgccaagtgtgtggtttcctcagcatagggtagagtcatctaatttgcatctctaatcccatccctagaggagaggtaggagaatgttggaacgggtgtctgagtttaaaggcaagaagcaggaacttggttctgtggctcctacctgtgtgctgtgtgctttgactaaacaccccctgtgcaggcttagtaagagggagtctcttctatgaaattggaaactagtgtagtcctctttctgttatgaggagcaatcctagatagagaatcagtcatgtggcctatcgctgtacattctatctgtaaaatgtatgaagaaggcttacttttaattagtgtgtagccacctttatcctttctctgtctctctgcctctgtgtgtgtgtgtgtgtgtgtgtgtgtgtgtgtgtgtgtgtctccctccctacttccctactctttcttctttgtattctatgaggcgctataataccttcttgcttcaaggttcaagtctctgagagttaccaagatattctgcccaaagatgctactgaagggtgggtcagagtcaaggccctctgggaaggaacaagtgcctgctcactcactgggcagacccaggagagtgtacatggctggtcatttccagaaaaagtctttaaaatggatcagccaaaatttccagtagtaatgtggatgctgcatacttctgttccaagacaagaagagatggaggaggggatgagagtggtataggtctccctcactgcctctatgccaagaaagtttcccagtctgtgtttcaactcttctagcagtgggcatcctcatctccccagcaggagctggaatggactcctgtctgttttgttttagtcaggatacccttcctgtctagcagccacaggtataaaacctcaaacctcatgaacaaagggggaagaaaattatttgaggagagggatgaagaagtctacaacaggagagagccctttttttagttggctcagattactatcttgaaacattctccagctctaggaacgtggtgcagaggcgtccataggcttctgtgtgctcttttcttcagcttttggtaccccctgctggtgaaatcctgagacctaattgacaagaatcacaacaccaatagagaaatatttgcaagttcagaaaagtcacacgtacttgtacttgagtgttaaaagccccgaggatccagaccttaattaatgagaggaccaccccaggagtcatgactattttatgatgttggggtgttttgttttatttttaatgttctgtgacttgggatagtctgtgggatctaaagttaacaacaacaacaaacagacagacagacagacagacagatttctgtgaatattccactaattctgccaatattgtaagaataaaatactgagttatctacccaacatattccgaggcacacactgatgccatgcactgttccccttctctttgcctgtactcgtctgcttttgaagtggttataatttgtacttagagcaggatagccatcttttctacacttcaagtcacagacttgttcaatggaaatttgtgcaacaaatttatcgagtgtgggctatgtgccagatcctcagcaagcaactggagtaggcatgtggagtccaaagcccttctcccaagaggtacttcctagtgggtgagaattgagtgactaacacaggagggatgcgggcttagctgatagggtgtcgatatgttacctggtcaccaactagagttcaaaccaaggtttaactctctcagcaccaaacatttcttctctgcattctccatctctgtgattctctatgtctgaacttaattatttaatgcttgcctttgccatttatctctggatttgtcgagggtcaaggtgaagaggacaaggctttctttacacttaacagagcttgatacatgtaggtgctcaaatatctgttcaaagaatgagtcagccggagaggagaaaattacagttctgttagtggagcagcaagaagcctcagagaaggtctgacattggaatgactttcaacttgaaggatgaagagaaatgcccagcggaaaggaataagaaagcatccaggccaagtgtcctgagcaatgtggggtagagggacataattcctgtttgctaggaggcatggatgggtggtgaagctgaagcccagtccacattttaaagatgttgggtattttcagatttgagttttctccagaagagaaaaataaatcaataagagggaaaagataagttaaattctttggtaatgacaagaactatcaattttttcctgttacaggtattagttataatttttaaattttgaatttcaaaggatagagataggtctgtagctttgagtttgtttgtttgtttttctctgtgcctcttctgtttccacctttaaggctgtacttattgccaaaacattcatataggatgtccattaccaaaacactcacacaggactcctatcaccagaacaagcaggaggtttcagccagccatgggctacatgcccaggacactgttatggtttgcaggagcgccatcccaaccccaaaggattgtgggttagaccgtggactgcaatgctatgaggtgcggtcaggcttagtggaggtccttaactcaaaggagggtatttaagaccacagcctatgcaaatattgtgcttcctggctcttgtcctgagaagtttgctctgcccgctatgaacatataaaatcttcagcccttgctagaggcaaagaagcaagtggggtcacccagtcaatgactagtaaaccttttcttttaagaagtttattgtctctggtatatttttatgtaaaggtagctaatatagatatcatatagtggatgtttatagcttagttgttaaattttttaaaatacctccatgtttggagaggttcggcctttcctttcttttcttttctttttctatataggtatttggctcaatccaaatatttctataaaatgtcatttttctaagaagcagtgagacctcttttggatattattattcctttggaggctgatgatttgtgttgaagacaactctctctttattattctaccctgaatggaatgagattggctggaagttctgccccgaaggaaatattaaagcctctgattcattctcatttgtagttctcaagttaattctcttatcagatttccttttatttcctgctggggcaatgtgagcgagcttagatggaggcaaaatatctgttgtatatcctttcaaatttatgattatgaaggtcacatatacatttttaaacacatgctttttgataatggatgaagaataaaattttgaatgccatcagctacaaaactgttcatttgtcttatgttgctcttcttcttggctgttgattgactgatgatggtagaaagggccaggctaagcaaggcttgatttcttgtccttctgctgtctacctaaagtagttccactgatacagcagtctgcctgtggccaaaccattaatgaccaaaaacatgtgtttcttttcttgagtgcaattccttccccggaccaatttttaggaataaataaatgaagaattccactttaggctgcatggatcttcagattatggccaaatgaggaattataaaagctttttttcttctcagtcctagagccaggttcagtctgtccttttctctgccatgttttctgcttcaggaatgcgttcttcaggggctccctcagaggggccttttaacacctgtagcttttaattagattcagctaaagagaactgctataggaagtcagaggatgggaagagaggagccagggtattgtggcctgtgatttcctctgtgtgttcttctaggtctgactagaaaacatctgcccttctggacttccctttccaactcttgaggattctgattaggtctcccctgcttgtccctcggggctcctacgtgggaaaaggtctcttgtctctgtgctacatcatctttctgtccccaacaaccttttttaacagtcctttctataaacaaagactttttaaattatcttcatttaaaagtgccatctgtcattctatatagtctacacctacatattagacccctgttcttaggaggaggctgtcagttgggagtttggtcccagataaatccttctaaaacacttctccatccagatttgttttttcctttgatgctccttgtcgaagggagatgctaactcttgaaatgacctatctcatgattagggcatggtttctatgttacagttactttcgcctctttaggatgtttgttatttccaggctgaaataagaatagcaaaggttaaggttaaagccaggttctgtgaagactagagcagtagactcagagaattatccttgagagacttatttagcctgtagctttccatctgctaggaatataatgactatatttagatatatgtatgttggaaaaacccatagggaccacatggaaggaagggtcaccacatttttatcttctgtgatatacctaagccccatcattttaaatttaagtgaaatagatttttttttaatccatgaaagaagaggcctttgacctttttagttccccagcgaggaatcaaagtcactgtcacttggtataattcaaagacaggtggaattccacagtggaactgccgggagggggttgagacgttagaatgtggtcagatgaatcagcaaggatttcatagcaatgtccatgtgatcgctgtcatttatgtgcccggtactgtgttgtgtgtattatatgtgctgcctcatttagtccttacatctgtattaggctaatcctcattgtgtacaaaagttcaatgaacagagaacaataaaactgagccagggaggcaacagaggtaagctctgaacccatgtctgtctaatgctaaaggaggtttagcctcagtagttggtgtcaggactactagaagatcttaatggctatatcttcaggtaattccaacttacaccaaactttgagaaatactctgatacactatttattattattattattattattattattattattattattattattattgcctccgtggttctctagaactgttgctcctataagaatatccatgagtcgagtctagctctggcttctctttctttgagcaaagagactaatctttaccctcgccaaccatcaacccctacttcagtctactgctctataatgagttcttttattagtcaacctatgaggaagactaaactttatctcttatgagatagctatgccttatcagttaaaatgtaagtaaaatagattattaggtccataaaaaaaacctttgaccttttagttccctagtgggaaataaaagtctctatcacctggtataattaaaatagagatagaataggtgggtgatgtttagttgcatgaaaagagaaggcgcctcctgacctcttcctccctctaagaaagtggggagtctctctgatttcccattataagttcaattatataccatgctcattctatgaatagaaaaacttaaattgcatatttccaactaaataaattgatttctagtttcagaattgcttgtgtttacttgactctgacattggagagtcggccttgcctctgcttttattgaatgaactaaatatgctattgagaatggggggtgaggaaagagaccaacctctctttctagtcctctaatacaactagaaccatctgactgtgatttttcccttgcacatgtcccaaaggaagctggctaagaagcagaaggagacccagagtggagcccagagggagatgggtcctgtggcctcgactgacaagcctaccgccaagctcggcaccaaccgcaatgatgaaggcttctcctccagctctcaggatgttaatggattcagtaagtcaagccgcctaaggcgaatggagtctccagggtcaattttggtcctggtgcctctcctgtggatcccacacaaggaccaggtctgggaaagcatgcaatcagagtgctttcctgagatatcagaggtgaagggtcttctccctggcaaaactttagggcatcccaatctgatgtaaaaggcatatttgcatatttaagattataggactgggggtgtagttccaccaatagacatgtcacatgagcatgaagacctgcgtttgaatccccaggacacaaagaaaaagttagtcagggtggcatggggaggtggagacagggggatttcatagggtttactgacagccagtctagcctaatcattgagctccaagtctttttttttttttttccattttttattaggtatttagctcatttacatttccaatgctataccaaaagtcccccttacccacccacccccactcccctacccacccactcccccccttnnnnnnnnnnnnnnnnnnnnnnnnnnnnnnnnnnnnnnnnnnnnnnnnnnnnnnnnnnnnnnnnnnnnnnnnnnnnnnnnnnnnnnnnnnnnnnnnnnnnnnnnnnnnnnnnnnnnnnnnnnnnnnnnnnnnnnnnnnnnnnnnnnnnnnnnnnnnnnnnnnnnnnnnnnnnnnnnnnnnnnnnnnnnnnnnnnnnnnnnnnnnnnnnnnnnnnnnnnnnnnnnnnnnnnnnnnnnnnnnnnnnnnnnnnnnnnnnnnnnnnnnnnnnnnnnnnnnnnnnnnnnnnnnnnnnnnnnnnnnnnnnnnnnnnnnnnnnnnnnnnnnnnnnnnnnnnnnnnnnnnnnnnnnnnnnnnnnnnnnnnnnnnnnnnnnnnnnnnnnnnnnnnnnnnnnnnnnnnnnnnnnnnnnnnnnnnnnnnnnnnnnnnnnnnnnnnnnnnnnnnnnnnnnnnnnnnnnnnnnnnnnnnnnnnnnnnnnnnnnnnnnnnnnnnnnnnnnnnnnnnnnnnnnnnnnnnnnnnnnnnnnnnnnnnnnnnnnnnnnnnnnnnnnnnnnnnnnnnnnnnnnnnnnnnnnnnnnnnnnnnnnnnnnnnnnnnnnnnnnnnnnnnnnnnnnnnnnnnnnnnnnnnnnnnnnnnnnnnnnnnnnnnnnnnnnnnnnnnnnnnnnnnnnnnnnnnnnnnnnnnnnnnnnnnnnnnnnnnnnnnnnnnnnnnnnnnnnnnnnnnnnnnnnnnnnnnnnnnnnnnnnnnnnnnnnnnnnnnnnnnnnnnnnnnnnnnnnnnnnnnnnnnnnnnnnnnnnnnnnnnnnnnnnnnnnnnnnnnnnnnnnnnnnnnnnnnnnnnnnnnnnnnnnnnnnnnnnnnnnnnnnnnnnnnnnnnnnnnnnnnnnnnnnnnnnnnnnnnnnnnnnnnnnnnnnnnnnnnnnnnnnnnnnnnnnnnnnnnnnnnnnnnnnnnnnnnnnnnnnnnnnnnnnnnnnnnnnnnnnnnnnnnnnnnnnnnnnnnnnnnnnnnnnnnnnnnnnnnnnnnnnnnnnnnnnnnnnnnnnnnnnnnnnnnnnnnnnnnnnnnnnnnnnnnnnnnnnnnnnnnnnnnnnnnnnnnnnnnnnnnnnnnnnnnnnnnnnnnnnnnnnnnnnnnnnnnnnnnnnnnnnnnnnnnnnnnnnnnnnnnnnnnnnnnnnnnnnnnnnnnnnnnnnnnnnnnnnnnnnnnnnnnnnnnnnnnnnnnnnnnnnnnnnnnnnnnnnnnnnnnnnnnnnnnnnnnnnnnnnnnnnnnnnnnnnnnnnnnnnnnnnnnnnnnnnnnnnnnnnnnnnnnnnnnnnnnnnnnnnnnnnnnnnnnnnnnnnnnnnnnnnnnnnnnnnnnnnnnnnnnnnnnnnnnnnnnnnnnnnnnnnnnnnnnnnnnnnnnnnnnnnnnnnnnnnnnnnnnnnnnnnnnnnnnnnnnnnnnnnnnnnnnnnnnnnnnnnnnnnnnnnnnnnnnnnnnnnnnnnnnnnnnnnnnnnnnnnnnnnnnnnnnnnnnnnnnnnnnnnnnnnnnnnnnnnnnnnnnnnnnnnnnnnnnnnnnnnnnnnnnnnnnnnnnnnnnnnnnnnnnnnnnnnnnnnnnnnnnnnnnnnnnnnnnnnnnnnnnnnnnnnnnnnnnnnnnnnnnnnnnnnnnnnnnnnnnnnnnnnnnnnnnnnnnnnnnnnnnnnnnnnnnnnnnnnnnnnnnnnnnnnnnnnnnnnnnnnnnnnnnnnnnnnnnnnnnnnnnnnnnnnnnnnnnnnnnnnnnnnnnnnnnnnnnnnnnnnnnnnnnnnnnnnnnnnnnnnnnnnnnnnnnnnnnnnnnnnnnnnnnnnnnnnnnnnnnnnnnnnnnnnnnnnnnnnnnnnnnnnnnnnnnnnnnnnnnnnnnnnnnnnnnnnnnnnnnnnnnnnnnnnnnnnnnnnnnnnnnnnnnnnnnnnnnnnnnnnnnnnnnnnnnnnnnnnnnnnnnnnnnnnnnnnnnnnnnnnnnnnnnnnnnnnnnnnnnnnnnnnnnnnnnnnnnnnnnnnnnnnnnnnnnnnnnnnnnnnnnnnnnnnnnnnnnnnnnnnnnnnnnnnnnnnnnnnnnnnnnnnnnnnnnnnnnnnnnnnnnnnnnnnnnnnnnnnnnnnnnnnnnnnnnnnnnnnnnnnnnnnnnnnnnnnnnnnnnnnnnnnnnnnnnnnnnnnnnnnnnnnnnnnnnnnnnnnnnnnnnnnnnnnnnnnnnnnnnnnnnnnnnnnnnnnnnnnnnnnnnnnnnnnnnnnnnnnnnnnnnnnnnnnnnnnnnnnnnnnnnnnnnnnnnnnnnnnnnnnnnnnnnnnnnnnnnnnnnnnnnnnnnnnnnnnnnnnnnnnnnnnnnnnnnnnnnnnnnnnnnnnnnnnnnnnnnnnnnnnnnnnnnnnnnnnnnnnnnnnnnnnnnnnnnnnnnnnnnnnnnnnnnnnnnnnnnnnnnnnnnnnnnnnnnnnnnnnnnnnnnnnnnnnnnnnnnnnnnnnnnnnnnnnnnnnnnnnnnnnnnnnnnnnnnnnnnnnnnnnnnnnnnnnnnnnnnnnnnnnnnnnnnnnnnnnnnnnnnnnnnnnnnnnnnnnnnnnnnnnnnnnnnnnnnnnnnnnnnnnnnnnnnnnnnnnnnnnnnnnnnnnnnnnnnnnnnnnnnnnnnnnnnnnnnnnnnnnnnnnnnnnnnnnnnnnnnnnnnnnnnnnnnnnnnnnnnnnnnnnnnnnnnnnnnnnnnnnnnnnnnnnnnnnnnnnnnnnnnnnnnnnnnnnnnnnnnnnnnnnnnnnnnnnnnnnnnnnnnnnnnnnnnnnnnnnnnnnnnnnnnnnnnnnnnnnnnnnnnnnnnnnnnnnnnnnnnnnnnnnnnnnnnnnnnnnnnnnnnnnnnnnnnnnnnnnnnnnnnnnnnnnnnnnnnnnnnnnnnnnnnnnnnnnnnnnnnnnnnnnnnnnnnnnnnnnnnnnnnnnnnnnnnnnnnnnnnnnnnnnnnnnnnnnnnnnnnnnnnnnnnnnnnnnnnnnnnnnnnnnnnnnnnnnnnnnnnnnnnnnnnnnnnnnnnnnnnnnnnnnnnnnnnnnnnnnnnnnnnnnnnnnnnnnnnnnnnnnnnnnnnnnnnnnnnnnnnnnnnnnnnnnnnnnnnnnnnnnnnnnnnnnnnnnnnnnnnnnnnnnnnnnnnnnnnnnnnnnnnnnnnnnnnnnnnnnnnnnnnnnnnnnnnnnnnnnnnnnnnnnnnnnnnnnnnnnnnnnnnnnnnnnnnnnnnnnnnnnnnnnnnnnnnnnnnnnnnnnnnnnnnnnnnnnnnnnnnnnnnnnnnnnnnnnnnnnnnnnnnnnnnnnnnnnnnnnnnnnnnnnnnnnnnnnnnnnnnnnnnnnnnnnnnnnnnnnnnnnnnnnnnnnnnnnnnnnnnnnnnnnnnnnnnnnnnnnnnnnnnnnnnnnnnnnnnnnnnnnnnnnnnnnnnnnnnnnnnnnnnnnnnnnnnnnnnnnnnnnnnnnnnnnnnnnnnnnnnnnnnnnnnnnnnnnnnnnnnnnnnnnnnnnnnnnnnnnnnnnnnnnnnnnnnnnnnnnnnnnnnnnnnnnnnnnnnnnnnnnnnnnnnnnnnnnnnnnnnnnnnnnnnnnnnnnnnnnnnnnnnnnnnnnnnnnnnnnnnnnnnnnnnnnnnnnnnnnnnnnnnnnnnnnnnnnnnnnnnnnnnnnnnnnnnnnnnnnnnnnnnnnnnnnnnnnnnnnnnnnnnnnnnnnnnnnnnnnnnnnnnnnnnnnnnnnnnnnnnnnnnnnnnnnnnnnnnnnnnnnnnnnnnnnnnnnnnnnnnnnnnnnnnnnnnnnnnnnnnnnnnnnnnnnnnnnnnnnnnnnnnnnnnnnnnnnnnnnnnnnnnnnnnnnnnnnnnnnnnnnnnnnnnnnnnnnnnnnnnnnnnnnnnnnnnnnnnnnnnnnnnnnnnnnnnnnnnnnnnnnnnnnnnnnnnnnnnnnnnnnnnnnnnnnnnnnnnnnnnnnnnnnnnnnnnnnnnnnnnnnnnnnnnnnnnnnnnnnnnnnnnnnnnnnnnnnnnnnnnnnnnnnnnnnnnnnnnnnnnnnnnnnnnnnnnnnnnnnnnnnnnnnnnnnnnnnnnnnnnnnnnnnnnnnnnnnnnnnnnnnnnnnnnnnnnnnnnnnnnnnnnnnnnnnnnnnnnnnnnnnnnnnnnnnnnnnnnnnnnnnnnnnnnnnnnnnnnnnnnnnnnnnnnnnnnnnnnnnnnnnnnnnnnnnnnnnnnnnnnnnnnnnnnnnnnnnnnnnnnnnnnnnnnnnnnnnnnnnnnnnnnnnnnnnnnnnnnnnnnnnnnnnnnnnnnnnnnnnnnnnnnnnnnnnnnnnnnnnnnnnnnnnnnnnnnnnnnnnnnnnnnnnnnnnnnnnnnnnnnnnnnnnnnnnnnnnnnnnnnnnnnnnnnnnnnnnnnnnnnnnnnnnnnnnnnnnnnnnnnnnnnnnnnnnnnnnnnnnnnnnnnnnnnnnnnnnnnnnnnnnnnnnnnnnnnnnnnnnnnnnnnnnnnnnnnnnnnnnnnnnnnnnnnnnnnnnnnnnnnnnnnnnnnnnnnnnnnnnnnnnnnnnnnnnnnnnnnnnnnnnnnnnnnnnnnnnnnnnnnnnnnnnnnnnnnnnnnnnnnnnnnnnnnnnnnnnnnnnnnnnnnnnnnnnnnnnnnnnnnnnnnnnnnnnnnnnnnnnnnnnnnnnnnnnnnnnnnnnnnnnnnnnnnnnnnnnnnnnnnnnnnnnnnnnnnnnnnnnnnnnnnnnnnnnnnnnnnnnnnnnnnnnnnnnnnnnnnnnnnnnnnnnnnnnnnnnnnnnnnnnnnnnnnnnnnnnnnnnnnnnnnnnnnnnnnnnnnnnnnnnnnnnnnnnnnnnnnnnnnnnnnnnnnnnnnnnnnnnnnnnnnnnnnnnnnnnnnnnnnnnnnnnnnnnnnnnnnnnnnnnnnnnnnnnnnnnnnnnnnnnnnnnnnnnnnnnnnnnnnnnnnnnnnnnnnnnnnnnnnnnnnnnnnnnnnnnnnnnnnnnnnnnnnnnnnnnnnnnnnnnnnnnnnnnnnnnnnnnnnnnnnnnnnnnnnnnnnnnnnnnnnnnnnnnnnnnnnnnnnnnnnnnnnnnnnnnnnnnnnnnnnnnnnnnnnnnnnnnnnnnnnnnnnnnnnnnnnnnnnnnnnnnnnnnnnnnnnnnnnnnnnnnnnnnnnnnnnnnnnnnnnnnnnnnnnnnnnnnnnnnnnnnnnnnnnnnnnnnnnnnnnnnnnnnnnnnnnnnnnnnnnnnnnnnnnnnnnnnnnnnnnnnnnnnnnnnnnnnnnnnnnnnnnnnnnnnnnnnnnnnnnnnnnnnnnnnnnnnnnnnnnnnnnnnnnnnnnnnnnnnnnnnnnnnnnnnnnnnnnnnnnnnnnnnnnnnnnnnnnnnnnnnnnnnnnnnnnnnnnnnnnnnnnnnnnnnnnnnnnnnnnnnnnnnnnnnnnnnnnnnnnnnnnnnnnnnnnnnnnnnnnnnnnnnnnnnnnnnnnnnnnnnnnnnnnnnnnnnnnnnnnnnnnnnnnnnnnnnnnnnnnnnnnnnnnnnnnnnnnnnnnnnnnnnnnnnnnnnnnnnnnnnnnnnnnnnnnnnnnnnnnnnnnnnnnnnnnnnnnnnnnnnnnnnnnnnnnnnnnnnnnnnnnnnnnnnnnnnnnnnnnnnnnnnnnnnnnnnnnnnnnnnnnnnnnnnnnnnnnnnnnnnnnnnnnnnnnnnnnnnnnnnnnnnnnnnnnnnnnnnnnnnnnnnnnnnnnnnnnnnnnnnnnnnnnnnnnnnnnnnnnnnnnnnnnnnnnnnnnnnnnnnnnnnnnnnnnnnnnnnnnnnnnnnnnnnnnnnnnnnnnnnnnnnnnnnnnnnnnnnnnnnnnnnnnnnnnnnnnnnnnnnnnnnnnnnnnnnnnnnnnnnnnnnnnnnnnnnnnnnnnnnnnnnnnnnnnnnnnnnnnnnnnnnnnnnnnnnnnnnnnnnnnnnnnnnnnnnnnnnnnnnnnnnnnnnnnnnnnnnnnnnnnnnnnnnnnnnnnnnnnnnnnnnnnnnnnnnnnnnnnnnnnnnnnnnnnnnnnnnnnnnnnnnnnnnnnnnnnnnnnnnnnnnnnnnnnnnnnnnnnnnnnnnnnnnnnnnnnnnnnnnnnnnnnnnnnnnnnnnnnnnnnnnnnnnnnnnnnnnnnnnnnnnnnnnnnnnnnnnnnnnnnnnnnnnnnnnnnnnnnnnnnnnnnnnnnnnnnnnnnnnnnnnnnnnnnnnnnnnnnnnnnnnnnnnnnnnnnnnnnnnnnnnnnnnnnnnnnnnnnnnnnnnnnnnnnnnnnnnnnnnnnnnnnnnnnnnnnnnnnnnnnnnnnnnnnnnnnnnnnnnnnnnnnnnnnnnnnnnnnnnnnnnnnnnnnnnnnnnnnnnnnnnnnnnnnnnnnnnnnnnnnnnnnnnnnnnnnnnnnnnnnnnnnnnnnnnnnnnnnnnnnnnnnnnnnnnnnnnnnnnnnnnnnnnnnnnnnnnnnnnnnnnnnnnnnnnnnnnnnnnnnnnnnnnnnnnnnnnnnnnnnnnnnnnnnnnnnnnnnnnnnnnnnnnnnnnnnnnnnnnnnnnnnnnnnnnnnnnnnnnnnnnnnnnnnnnnnnnnnnnnnnnnnnnnnnnnnnnnnnnnnnnnnnnnnnnnnnnnnnnnnnnnnnnnnnnnnnnnnnnnnnnnnnnnnnnnnnnnnnnnnnnnnnnnnnnnnnnnnnnnnnnnnnnnnnnnnnnnnnnnnnnnnnnnnnnnnnnnnnnnnnnnnnnnnnnnnnnnnnnnnnnnnnnnnnnnnnnnnnnnnnnnntctaggttctcaggtgtgttggggttccctggactgggcgaagtgggtgtgctgggttctggtgatggtgagtggtcttggttcctgttagtaagattcctccgtttacctttcgccatctggtaatctctggagttagtagttatagttgactctgtttagagattgttcttctggtgattctgttaccgtctatcagcagacctgggagacagattctctcctctgagtttcagtgctcagagcactctctgctggcaagctctcttacagggaaggtgcgcagatatcttgtatttggacctcctcctggccgaagaagaaggcccaaaacaggacctttctcagacactgtgttgctttggcagttcccaggtggtacagactctcacctaagcagactaaattcctaagttccttggagtcccgggaccaagatggcgaccgctgctgctgtggcttaggtcgcctccccagccgggcgggcacctgtcctctggtccggaaggtggccggctgtccccggcccacacagggtgctgcctcagcgcctctgtgcttctgcctgttccagaagctgtctggttctctggcgcaccctctcacctgttcagactaatttcctaagttcggcgggtcccggaccaacgagctccaagtcttatgagacaccatgtctcaaaaataaggtaaagaatgattgaggtagttatattaactgttgatattcacatatatatgcatgtacacacatgcaaatatgtgcacatatctataaaccatatatacctaaaatcaaccaactataatctatgcctaagcagatataatgggaacaagtcatcctggatagagtcaggtcagggagttaaaaataaaaacagttactaagaagaaggaggaggtagaagaggaggaaaaggagatgactttaaggcaaaaagaaaaaagaaaaaaatccatactgaagttattggctggcaattttcaaagctatttcacatttcctgtgtaatgtagatgagtcatggaacgtctatgtctctggccctaatagttcagaaactgagtttaaagtaacaatctctaaaatcacaattaggtccagtatccatactaaaaactgtgttcccaagcatggttttattaggtcaagactatcttcatcatcatgcagagttaataaggtgtccttggctaatataagtagtttaaattccatggctggtccaagcaaaggagaactccatggctgggtagttacaaacctgtttggtgaccaggcttgagaaaatgtccttttgctctactttttcaaccatgctatacactagttccttcctggatctgataataagatagtaaattttcaccatttatcttatacattgtagacagaagaaaccatttttcataaagactgctttagatatggtctgtgtgggagatgtggagtgacaagagcactagagaataaaggaaaccaatataaatgctgtatcatctatgatgaagacacactgggttcatttctgccatcagcctacgagacacttagtagggctgatcttatttggtaggtgagatatgtttgcctcagattcccagagttacatagatcatttctcaaggatccaaaatccctaagctggagcatagcattaaacttgaaaggtttttccaagcaaaatgatggatgcgagacaggacagggactgagggccatggattttttaatactacccagatggttcttagagacaccctagttaagtactcagaactttgaggatggcagtgattatgttcagatggaggagtgttgtcttttggagcgaagattagtttaaatctgctatatcccccaaaagaggctaagaagaaaagaatactcatatcctttaactgcattcaccaattagtaatattttttcaatattgacatccggttgcactttctctcactgaacagaattttctgagctatttagaagttaaattgaggatggaatgtttctagaatatttcatctctagagatttgggtatgtgtttcctatgatataaaacagctcttcatcataccacaatagaattagacttctgtaagagctatgacgtcattccaatgatactgaagatgcaagtccacttttaaagttcctgtgtgtccccagaatatgctggaacttttgctgtaaatcaggacccaaccaaggtgctcatttccatttggttttcctaaagtcctctggccttaattttctttcaggacacttttcaaaagtctgaggcagttgttccatagagtggtccatgagacagagttgtgtgattttcatttaagacatcagatttcatttaagttaatcattttagaaaaagatacacaacgtggtggtattgtttactgctctaaactttatcaatagccacatgatatcactactctactcctattgaccatgtaagtttgaatacaacttaaggtttaataatggttttaagacaaaaatctaaaaatatactgacgatcttatgaacaaattttaataatttttgcctcttcttggagataagagacaatctatggtctccttaaccctacatatatcccattcctgtccttaatctgggtgaattacccatattcatatatttgacaggattcaggaacgggaggagacacagaaccagagaatcgcagaggagctggctaggaagtgaccttggtgtgtacttgaagaaaggttgatcctgaactgcactgagctgtccctggttctttgagcattgcaagtttagccttaaaaaggacactagttgtagttattcataccaaaactctcctgcacatcccagccttgtgtgcacacattttcgctgttctaaaagttccccaggaagacatcagatgccgaaagattatggtccagcaagcatggcaatcactgtgaccctgaaattgcaggtcttaagtctcgagcttgctagtcatatgggaaaacaacctaggtcacactgattccttggatttcaaagaaaaatacaaccactgtttttattgtggataaaaagttagacctccaagataaaaactcttcttcactaatgaaaaagaaagggtaaaaacatgcagcgaggtctcctgggatgttttaaaggtcaaagctagtcttcccaaacagatgtgtctgctgtccatgtcgtatatctgtatatatctgtatatacatgtatacataaaccatatgcattcctatgtatctgtatatagatatttattttattgatatttctttttaaaagtcaagaaaaaaatttcaattggctggttatattcaattattatgaaatcatgcatttgtttgaatcactaaatattttagaattctttctgcgcatctagtgtcttcagactgcagctataaacatactctagggaattttgttcaatgccctaaaatgcatcaggtaacgtttaaaatgccctgtgggaccactgggatgagttttgaagggggaaaaaatgtaagtaatgcttacactagagatgtaaaaattgcttctgaaatcaccctgatgtatgtaaaattgaatctattttcgtgacattagggaagtggctgtctggtttctgaatcggcatctttaagagtgactgagattatgtgcaaattctgaagcagcataggggggggggggggcagaagaacattccttatatggggaaggattatagaaggacatgccttgggcaattattccattattgaacaggtgggccgtacctttattcaaattctgcctcttcctgcttaggtctattttctggtcttatctattaccagtgactgttatgtttggcaacatctattcagtcaagcctctcactgttgtataggaacaacgacctctggggcagtggggtgacagggctctgtcagacatgggctgttgctgtggagtgcttaggcattcttttaaaagctgtgcatgtcacatttcaaggacaaacaatgcacattgttttccatttaaagagaagctggctttttgttaggtaatctgattttgatcttggctgccttgaatacttgtaatttttttccctgtgatcttttgctcactgggattgtcttctgggtctttcttcaagtacactccttacacatcaggcttatgtctgcttctttatcttttgtgtctctgtcttctcctcgctcattttcagactaaacaaaatgctgcaaaacaaatcacagttgaatcactaggacatgggggcccggctgttctgttcacctttctcatagggcatttaacttcctgttttactggctaccattagttagcactccctcggagatagaattacaggttgtgaaccacctgatttggacactgaaaaacaaactcaggtcctttggagagcagcaagcaagcacttttaaccactgagccatctctccagcctccagataaatatttctatttgtgcaacatatttcaacactagacccttattttctttttttattaattgaattttttacactccatattccattccccacccccatccaccctctgtctgctccacatcccacacttcctccctaccacaccccatctccacgtggatgcccccacccccaccccatcccctgacgctaaactccctggggcctccagtctcttgagggttaggtgcatcatctctgaatgaacacagacccggaaatcctctgctgtatgtgtgttgggggcctcatatcagctgatgtatgctgtctatttggtggtccagtgtttgagagatcttggggttccagattaattgagactgctggttctacaggatcgcccttctccttagcttcttttaaccttccctaattcaacaataggggtcagctgcttctatccattggttgggtgcaaatatctgcatctgactctttcagctgcttgttgggtctttcggagggcagtcatgataggtccctttttgtgaggtctccatagcctcagtaatagtgtcaggtcttgggacctccccttgagctagatcccactttgggcctgtcactggaccttcttttcctcagactcctctccatttccatccctgtaattctttcagacaggaacaattatgggttagagatgtgactgtgggatggcaaccccattcctcacttgatgtcctgtcttcctgctagaggttggctctataagttccctctccctactgtctggcatttcatctaaggtccctccctttgagtcctgtgagtctttcacctcccaggtctctgtagatccttattttcatgtcatagatagcttataggtttaatattgtgcctgttctacatgcagggaaactgaaatccagaatacataccctttgacaagtcagaatcaggaaacatttgtccttgtatccattaaagcctatttacccagttcatccaagaatttaggaacgtactcaacaagggcactcatgataaagcaatagttaaaaaaaaaaaaaaagcctaagatcagacaattgtaaacaaaaacaaagtcaagtcaatggcatgtcataatataattatatcataattaaaatctaaatatgcattctagatcacacagatatcatcagacattggaccattaagtattctactaagtcaggagaagtttgagaaaagtagttataaattgaaaactcacatcacagcaggtactaatttttaaatatggatctgtctctgaactttctggtagcaaacattcaagaaggaggataatttgggggagatcctactatgccctggaacttttgctttgtgtaaatcctgctcttaagcttcctcgaaaatttgtaaattctgtactacctccattttgaaaatgaagaaaccaagattaggagagcaaaaggagacatgccccaagtcacatctcacagaagtcgtagagatgagattaggagccaagtggagttttctaccctcaaaccagagtcatgacttgtagtttgacaactgccagcttcactgagtgatctctttggcacttgcagagacagatagcaccattcttcagggataacgtgggtaaaatttttatcattgagcagcgttactgacatggaatcagttagattcttatgaggtgttgggcttggtcatgatcatctaagtccagcctcacagtgaccccgtccagaccttatgtttgttactgaatccacttgactaatacattcctatattaaaacattttcctaaaattgtttaaagaattgtcaaagaaatctgtgtctgatagcatatattctcctttccaaactagacatctttgtctttaatcattatcaatccctctacaatgaagctgggaggaaaacaaaaaatacaaaggcaagatagtcctgaagagtgggaagaccgtgccacctcccataccctctattcatccaaatgcctgcatcagatcacctgcccagtgaatgctctcacagacagagtctgcaggaattgtccctctaggagcttcctaggaaagccaggctctacatggatggtctcatattcattattccttcctcatattcaatcttcctaggaaagattgctggaacaatctgcaagaagatacaaaaatgaacaaacagggatggcttctggtccctggctcacaacagggcagggaatccgaggtctagacaatcagcatctttgctgtatgactttgtgttgaagcaacctgcacaaaggactccagggctcatctcctgtctttgtgaccaaaatacacccaggagtacacttcttggacagagatgaatattgttttccatttaaagaaacactgaccttttcttcagcaatctgattttgatcttgccaccttgcatactgataatttttccctacattcttttgttccctttctggatacttcttcagctgttatccctgcatattgtgcttatgtcttcttcatcttgtgtattcatgtgccatcttctcgtggttcatttcagcccagagagaaatgccccaggagctgttttcttctgatgaggagaatggcccctgaaccccgaggcacatccctgtcgctcaacagacagaactcataaaatgatttctttggacacaagtcaggaaatgctgaagtttgagtctatcataggatggttgagcagagatggggcaggtggcaggcagtgtcaggcaaaatgcagcctgaattattttagaaatatgttgtataactagagaaattgacataggaaagatagattgggactttaaaatgttatggagattggagcggattgtggcaagctccctgaggtgagctagctacagaaatgaatcttggccttctctgggggtaactgttgacttgatgtcatgtgatgctaatgactgttagctccactagggaccttatctgggtctgttattttgctgaatagtttcatatatagtatctagacccccaaacatcatggctaggtcgaattgttacccttgttatcctgatgttataaataacatcatcattgttataaagacagcctaaaatcctaaacatggttcctgggtcctctctggttccttataagaaaacactctgacccatcggatactcattgacaatttatttatatgaatgaatgagtcaatgaacaaatgatgtaattgggattcatacgaagatgtctctaattccagagccttatacttttctcggaatgaatttcatcttccatgaacctgaaatctgccactataatttcaattcttttatttctgcttactcacctgtgtaccaatcagtagcccagtgctggctttgtctgccctctggtgttggatagggcaatggaatcaaccaccctcaccccatctatttaactgttagactgaagtttccagctcttcttataagctaaacaattccatttcagtcatcaggcctcagaatacacacccctgttgtcaacctgctcaaaacagttgacccttctatttactgaccaaattcatggacctcctactccaagctgggactcccagataaccatgaccctctacttcaggctgtgacttcagagagctgtcatctccctcacactggcctccaaactggcatccaaaatacactgtccatgtctgaatcaatgtccaagaatctaccacatgcctgcctactgtaaatgccctgattccagtgagggctggcatatctgtcctatgtgaaaatgacttttcagatccatagggaggaagaattgatgtctcatccatgccaagcccaccaagctatgtgctactctgactgtgtcagccaataacattatttactctctcgggtctggagtatcaacaacaacaacaacaataacaacaaaatgctgttcaaatttatgataatcatggttcttcttcaagaactaatgatattgtggctagagaggtgacttagaggttaaaaacacttgctgctcttgcagaggacctgggtttggttcccaatcatcactgagccctgtcccatgggattcagtgcctttttctggcctctgtaggtatcaaacatacctacagtgcatatacttgcatataggtaaaacactcatatgcataaaataagaataaaccttttaaaggtaattaatgatatattcatttaaatgctgaatagttaatattattaacattgttagcatattgagaggattaaataatgttgtaaactgattgttaaaagatggggataaaaaggccttaaaatagaaatgaatagaactcctaacttcatagctttaaatggtagtgttagacctaaaacataggtctgtctgacacctctgccccctagtcaaaatcactcctttacatggccttgtggaagataggcattattattgccaaagaaattcaagtctgttctaactgtatagaagtccctgagctgtatagactttgtgtctggttagttttgtatgagatattttaacttatttacaagtttataaacagaagaaaagaaaagaaggttcacagacattgagccatccatttaaagcataatgtcccaaagccctctctctaaaggagcaccttcagcttgggtagtgcctaggaaaaaacacatccaatatgccttctaggtgattccaatgatgctcaagtttaaaactcactagctcaaggtaaagccaaggtctgtcagacaccaaaactcttgtgcctcgcttgctaagttgtctctggtgttaacaaaattgtaggctttctgggtaggaaggctctgcctgctctcttccctggagtagatgtttccaagggacattgctgtcaagggttatttgacctgaaggctgctagcatttgtcaatacaaccaaggatccacctttcaagagttctctctcaaccatgtgggattttcctttctggttgacctggacagttaaaagcctaagggttgctgggcatggtggtgcatgcttttaatcccagcacttgggaagcagaggcaggcagatttctgagttcgaggccagcctggtctacaaagtgagttccaggacagccaggactacacagagaaaccctgtctcaaaaaaccaaaaaaaaaaataaaaataaaaataaaaataaaaccctaagagtcaggatggaaggagcagaaatttccaaggtgaggcaacaatgagtcagagcgtgaaaaccaagagccgacagggcctcatgcagaggaatgcaaacgagaagtgcaaaaactctgtgcaggaacaattatcttttctggttgctccaggattaaattgaatctgggagaagaattgaatgttacaagcttgccacctccagttttattgaatattttacagggattattgaatattttgcaatcatccacttgactgacagataaaggacacgcttattaaacctggaaacccagagttgggtggaactgtttgctctttggaaaaaaagaaatgggaatgtaagtattccttaaggaagtgaacaaattgtctatcgcaaacagtatggagttagagtgtggcaagttgctcagaagaatattgaacaaaaatggatgtaacacaatgaatagtaaaaattaagaagtgtctgagataatgtctgatccagccttcccatactggaaagtggaaaatttggtcctgggggttgcttttcttcagatcattcattaagtcactaatggaattgggagtcgtttgggggctgagacccttctagctcctgttcaatagtttcattcataggcttgaaatgctgtatagtcattagtggtttgtcttcttgtaatttccacatacacccccctgtcccaaatctgatttctgcacaaatagaactttctcaaattgaattatccttttcatctcctcgttatgggagtagctgaggtgttcctttaaatattcattgaatgccgactatagggggaaatattatagggattgtagagataaataagacacgacggtctctgccttcaaggatattagtctcctccacgaggagacttgtgagtggattcgtttcaataaatatggtaagtgatagaggaaaggtatgtataatgtcccaggaatgccaatcagaggttcagcaggtgattaactctgcctgagttagcaactgctcatttaaactccatgtaagagtggacttatcgtaggcaaaaggtacaacagcttaagatgtgcctggagcatcacaggctcagagcccagtgcattctgctaaaagcatatgacctgagatatgactgggctggcagttggaatttactaaggaaaggagtcaggggttgcatctgtggctaagttgagttcccattccaaggaggttatcctttctgagggctgaataaccctagagcgaggtgccctggcctcatgctgaatcctggcttcccaggctctgtgagttgcacactccattgcaggagtgtgcagtttgtcacccattgacagaccgtcactgtcactgtcactgtatgctggcgcagtcattcctcccagtaacttttcaaacggacttcagtaaagtgacaaagctgacaatttatgctaggccactgcatctccagaagaaaatagaatagtcctccatacttcacaggtggtcctgaattataacagggcacttagaaagtgcttcttatactaatcagggataaagaaaagatgctggaaatgtaaatatgtagttgctaggtagcagaataaaccaagtcttacagatttatttttttaatttcctcagctcaaagctgtaggttggaaaaataaaatcacagataattctactggctaagtttttgtgagtaattactggccaaagcacttcaaatggctcatttcgtataatattggaagcacttgtgtggtgcaggtaagacagaagcattctactgtcttctatcctttgcaccttagccagtttgagtctctgaattagtcaccatctactgctacaagagatccctgacaagggctgggagatgcactaatctatagatgtaattgttaattatcagaatttaggttaattatatatctatttagtagaataatagtgaaaggttctcccctaggttataggtcatgtctacccacaggttctaaccctggtaatggtgacacatctgcatttaacattgtggattgtaccttaagtcaatcaaaaagtagttactcctatgacattcatgacactattgcacagaggcatttcttggcaagccagtaactattggagatcagagtgttcactgctgggtaatactggcaattactttacactggtatcgtgcatagcaccttccagcactctataatctatccaggagcaatgaagcttctgcatcagaaccaacttgctgtttcctgttggtctagtgtatggtgtcttcagtgagaggttcttattgtcaagttctggagggtaacaaaaagcattgacaatggcctataacatttcaaagtttgtgagactccactggccaacaaaccattcatgacattaagctttttatttgttatcctgcagtgtctagtaggggcaatgccatcccgtaatagttatagggtaactgtgttccaagtcttttgctatttgagtgtgtttgtgtgggggttggtggtggtggtggtggtggtggtggtggtggtggtggtgtggtgtgtgtgtattctacagcagtaaggttctatctgacttctttgaaagatttttagagtaagttatatgcccatattctctcctctaccctgccctcccaaatatacctgcaatcccagcactgggaaactgggtgtggaggatcaaaagttcaagagtagcctcacctatatagcaaaattgatactggcatgacttatatgatatccttgataaataaaactagaataaaaccaatttttaaagacaacttaattctgaactctcactatatatagaacccatgtatttttctccatatccactggctctcttcatctctgcctgagtcatcaccatcctcatctctagcttcaacaaaaggtcatagtgcataaataatacataacaataaataatctctatttcccatcctaatctttctctactccattttcccataataaccagggatatcttattaagctaaacattaggataagatcctggaatcataaaccattcacatctcacatgctgtcacatcttactcccttttctgtgaacttcagctgtgctgtcttctctcacaggatttcatctatgccatctctctatctagactgtggtgggtgaactagagctcacaggacaaatctagcccaaggtattgcttaatacaaataaagttttatgagaataaattcattcttgttcgcatatttctatgagggcatttatgctgtggtagtacagttaattagttgccatagagaccgcttgacccacaaagcctaaaatatttactccctgacccatgagacaattccagcccctaattggttattttagctctctactcatgagttgttcccttgtgtgtgtgtgtgtgtgtatatatatatatatatatatatatatatatatttatcaatcttcttattcctttacccaatgtgttcccttttatcagcggtgccactgagttatgcttcctcatttttatcctgaaggctgactacagttttcagacacatttgtctaaggtctattttatgattgctccaagatggagggaagcatttatagtttattgttcccttatcctcagcatgcagtgcagtgtctgtaacagagcagctacccaaaactctctctaacaagtggatggatagataagtaaggattagacagagaaacactatgtgttcagaaaactataaggaatattaggcatagatggtaccgcatgcagttgcactcttttcaacatctataagcagatacaggtggagagcagaaatcaaaggatgtgcctttgtcagtcaggtgtcacccataccttagcgccagaattctaatactcaaggccattttacacattcattgtcatggttcctgacattctgggagttgttactcaaagaagcctttgaaatttagtcactgggagtctaggaatgtataaatcacacccccaatcccttgaacagcacggggtctaaaggggaggtcttcagtgcacacacaaatgagcgaatctcggtttggctgctacctggctctgccaagtagaagaggcaagagaaatggcaaagcaacatttataacagattggttctcacctgtctggttgggtgcatgtgtagacatggagatgtagcttatctggggggagggggaggctactgttgacaatgaacacctgttacacaggtctggtccatgtagtcatgggaagccagcttcccaacttgctctgagagccacaggctttctataattagtgtaacttatttaccagctaagtaggaaggcatttgggccatgttggtttcctaggtgctgatgtgcggatgagatgagacatcgaggtgagatgcgcacttgcaggagatgtgaggttcccttggttaaggacaacgtggtgcaggaattggattttacagaaacaaatgtcaagtcagaaagagaagccagtggccagtctcctcaccacatcaaaatgtaatagcaaggaaaacagcaggcactgtagtttgttcgtggtttggtgggccaggagtttgaacagagtacaagtgatgtttgcttctgtttcatggtgctgggttgtcctgagtggccaaaaatgactatgacaagctcccctagggccatatgtctagcacttcagttctttctcaggtagcatctgctggggataaaatgcccaatggctccagtgtttgcatctctgactcctgagctaaaatgactcaaacatctggagcaagctaatattgttctttccccatgcatccaatgggctcccttatagcatggagggctcagagcaatcagatgtcttctatcataatcagcttcccccagagagagtatttcaggaacatcaggaaatgcctattatcttaaaaatgaggtctatgtgccagcatcacttctgttggctgtcatcactgggagcagtcataggccaacttaacttgaaaaaacttgaaggacagattccatttctctacaagagaaatagcatacacatacaggagggaaaacgatcgatggtgttaattgccatctactgtataatgcagcttctcttgtgaggtttgagatgtactaatctgtaggtgtaacaataaatcgctaggagttgatttaacactatgcccctttagtagcaagctgtcccctagaacctctggccaatctagccatgggttcttggcctcaataacttgccagttaacacacagagaatcataactggtcgaaatgcagggaataagagattatgaaatgctccgccctaaatgggacatctgtaatgcacacactccacccagtttctagatttggggatcattctagaagaataagctgaaggttcatgggaggcagaggcagtgggcactttcaagaaagcggtggttttcagacacggcaaggtagtttcacatatgaagtcacagagagtgagacagcatgcttaagaccggcacaagctcaagccagaaaaattccggcatatttgggggagacagttatcaagtcccatttctatccaaagagctattagtaattgacagcttccaggaaaagggagaagtcattttctttaaagatatggcacccataggacaaccttactctagtggatggccccttatcccagagtatggagcccgaacaaatttggataagatgagttaaaataaagagaggatatgaggttaagtgtgtataggatgaggtgaaagggagagggcagacatgattaagcttaaagaatcatatgcccccaaattactaaaaatatgtagtttttaaaagattcaatggtagtcatcttagagacaaactggcacactattctaaaagaagaaaattaatacataggggtaggggttaggaagatgtctgctctctgctctcgctaggagtcagtatgaccaatatcaatagttcacaatttaccagtctcaacttttgttattgttaactctactgctaccaataaatagtttggtaaagtatctgcaggtttcctgactctagaaagtttctttttctctctcttgataaatacatactttcaaagagcagcccagcactagtgagatggcttagcaggtaaaagtgcttgccaacaaacgtgatgacctgagttctagtcatatgnnnnnnnnnnnnnnnnnnnnnnnnnnnnnnnnnnnnnnnnnnnnnnnnnnnnnnnnnnnnnnnnnnnnnnnnnnnnnnnnnnnnnnnatacatacatacatacacatcatacacacacacataagaaatgtaattaaaagttttaaaaacaagagtctaaaagtattgtcttttcctagagcttccaatggaatacagagtgcgggaattatgtgtttgtttttatatttgtggtcttcatcctccctgaagccaagtgctccctgtaatctcattccagtggacacacctttgtgaatggtttggcctattgtggtacttgaactattagctccttggtattaagtggtaggagatgaacacagacaagtgaacaatgggccatgtcttaaagaatatgaaaaagtattggaatgcattggtttctgcaaggagctaaggtagatgttaaaaatagagagaaaggcttgccatcagttttgtaaaggtcatcctggtgactgggaggcaaatgtgctagaggtagagtagctgaaactgtgcaagaaagtcttagttttccccagaaaccaggcttctaggaaagtgcacaaaatgatgatgtataccaggaattttgttatacacacatatacacacacacactcacacagtctctctctctctctctctctctctctctctctctctctctcacacacacacacacacacatacacatatatatatatatacactcacacatatacacacatgtacacacattcacaaacatatacacacatacacacatacttggagaattaccagccaacacaaaaatctcaagtgaccacctccttaaaataaaggtgtaagagagtgttacattctttattttctcattaatttatttattcacactacatcctaatcacagcccctttccctcctctcctctgagtcccaccctcacaagcccctttccctattacctcctccccttctcagagaaggggaaccactccctataggtaccaaccagccctggcacatcaagtcacagcaggacaaaaggcatcctcttccactgaagcccaacaaggcagcctacctaggggatgggatccaaaggcaggcaacagagtcagagacagcctccgctccagttgttaggggatgcacatgaagaccaagctgcacatctgctatatatgtgtagggagcctaggtccagcccatgcatgctctttggttggtggttctgtctcagtgagcccccatgagcccaggttagttgactctgtaggtctttctgtggtgtccttgacctctctgactcacccaatccttccctccactcttccatcaagctctgcctgatgtttagctgtgggtctctgcatctgtttccatcttctgctggatgaagtctctctggatacagttatgctaggctcctatctgcaagcatagcagagaatcattaatagtgtcaaaaggtagttccctcccattggatgactctcaagctgggctgatcattggttgaccatcccatcgatctctactccatgtttattcttgagcaccttgtaggcaggacaaattttgagttagaagggtctatgggtgggttggtgtcctcatctttccaatggaaatctcacctggctacaggagacggccatttaagttttcttctcacaatctgctaggagtctcagctagagtcacccccatagacttctgggagcctttctgtcccaggtttctggcttgtcccagagatgcccccccactgatttctgttctcccccccaccagtcctcttccactcccatcccccaaatgctccccatccctggtcccttctatgccccttctcccctgctagttccctctctccatccagctctcatgtgtattttatttctccttcttactgagatttaagcatcctcccttgagcactccttgttacttagcttctttgggcctgtggattgcagcatggttctcctgtattttatggctaatgtccacttataagtgagtacataccatgcgtgtctttctgggtctgggttacctcactcaggatattttctgtttttaagctctgggtattgattagatcttctgccttgcttcatattttcttggttaatcgatagcttgagagcttgatacctgaagtctttggacatgtttgatttagcaatgagtgtcattattcagataatatctcattgggacagttcagtttttgctaggtgaaaaccccttttcatcttcagggtctttgatctgggttagatgaaattccttctgatctgtagatgtgacagaggcttagaaagtaagagactcattccagactagcagtcactcctgtccgtactgcagtggggaccccagtggtgactcttcaaccagctgtgccctgtcagatacatctacttgcggatctgatctctggctgttgtcactgtaaccttatcattctatcctgtcactatcctttcaagtgggtctatcggcacaggtttatcaaacaactcaataccattgctatactttttatgaaaatacacttggctagcctgtcctgtgacttaaagatgtaaatctcatcatgtgtgctcaatcagccctccccaccccaaaccattccctattgctcttagaataaagttgaaatgcttctcatagtatatagagacccagagtgagctgacatctgcttacatagttagtgggggggggggcatatgtgtagttacacacatgatcacacatatgtgtgtatgtgtgaggggatacacatacatgtaaatccacacatgtagagaccagaggtcattgttaggtgtttctttttcaatccactttattcactgattgtccagactgactgctcagtgagcccctggggcttgctggtctccccactgtgcacagctcttctgcgtggaagttaaggatctaaactcaagtcctcactcatccatggcagacagtttactgacagagaatcctctttgccccgtatacctttgtctagaggtaggacctctccttgaacctgtagctcactaatttttctagccttggccaatcaacaagctgcagggatcctcctgtctctgcttccccagggctgggattacaggcagggaacaccacacccatgtttgtttctgtggatcctggggctcaaatgagcatccttgtgcttttgtggcaagcactttaccagctcaacatttccccagccctgttgatgtctttaattttatctctagccactgactagcttgcttaatacaactagaaatattaacttttcccctgtgctttgaaaacacacacatttttttcactttttaattaggtatttacttcatttgcatttcaaatgctattccaaaagtcccctataccccaccccccaccccctgctcccctacccacccactcccacttcttggccctggtgtttcccctgtactggggcatataaagtttgtaagaccaaggggcctctcttcccagtgatggccaactaggccatctcctgctacatatgcagctagagacacgagctctgggggtactggttagttcatattgttgatcctcctatagggttgcagaccttgggttctttctctagctcctccattgggggccctgtgttccatccaatagctgactgtgagcatccacttctaaacacacacattttaacaacatggatgctcacagtcacaattacattgcctttttaaagaatattcttctcccttgtcttttaatttttagccaccattcaggtctgtgattaaatgtcaactttgaaggggggggttctaaatatctaatctaaacaagttctacttttttatttacagtttttaattttaattaaaatctaattatattgcttttcatcatccctttcctgcctccaaccgttcctctgtcatctgcctccaattcctcccaggtcttctcaaattggtggcctctttttacgtgattactattgttataggtagaaagtcagacagatgtataaatatgtaaatataacccattggatctactgggtgttgcttgtgtgtataggatttcagggctgactgttttatattggataaccagttagggactctaatcagtcattagtttcctaaagttctttctctagatgtaggaccctctaagacttcctcttccaacttatcatgattattggtactgccattgtttaggtcttttttaggcagccacattgttgaggtaacatgaatatagcatccctgtcatttctagaaaacacaatctcacagcaggcttcctggggtttggatcttacaatcattccatctcctcttctgtgacatttcctgggccttacgtgcagcacttgtgttataaacatatccactgggacaaggctctccctgagcagttgatctttgccttatcatcagttgtggctttctgtgatgatcttcatttgctgcaaatcaaggctttttttgatttgatgtgacagtatacttatctgtgagtacaagttttagaatgcaattaggaattttacaggtttagcaaaataagttctccactaaaatccatgacctcactagtcccagtagttccctagctttctagtaccagacatgatttctcttgtcgtgaggatcttaagttcagttagacagtggttgattaacacccagatataagtgccacttgtacctttatcttgccgtaatgttcattattgtggttcataggcatcaaaattgcataacggtgctatctgtgtactttgcctctcagtatatatcagaaatgccacatttgaaaagacttgtttattcttctacatgttttgtgactaatagcaacacctttagccagtaaaatcacaacatgtagaaaattcacttctgttttggccaccaatgcattcttgaagattatgatagtatatggtataaaatagataatagataattatgtgttccatgaatcatttgttaattttgcaatcaagatggaccatggtggttctttttttttttaagatttatttattttttatatatacagtggtctgtccagatgtatgcctgcagggcagaagagggcaccagaacttcttatagatggttgtgagccaccatgtggatgctgagaattgaactcagcacctctggaagagtagccggtgctcttaacttctgagtcacctctctagccccatggtggttcaatttaattattcaatattcaagcaactattcttaatgcattgctagaaatgtgaaggattgatgactggaagatttgtaaagttgctcctagctttaaatcctatagtagaggaaggaggatcaaagaagagataattatactggtctggaaagggcatcagatgcatttcttacaaagctgtcattcaagtatctttggctttgccagttctaaaggtcccatccccaaatgatcacttccttgggttccctcacataaaactcttcagaaccactttgtgggtcctactgctccctacttgtaacttctccctatgtcttttccaaggttttaaattgctaatgtctaatctttccccagtcacagattatccatcttcagttttatgcctttatgaatcttgttaatggctggcagaatctgaaaagttatcttctctttctgtattaagcagcatgcctagttgtgttataagaaggtattaacattcattgactcctaactatatgccaaggactgtgctagatcctgtcgtatgttacaccagacattcttcttcatctgtgagatggtggttgcggataagcttctttggcaagggtagagattgagattcagacaggctgtgtaacttcctccatgccacatagctatcaagtggcaaatccggtttgaaaactaatcttttggttgcatatgattctgctatgatactgacctctcccccagatagtgagaaataatcacataccctctcaggctcacgtagaacagtgatgttttcaaatccccaaatgcagtctattcctaactctatttgtaagagtccattaaacccttcagattgttgacatggtcacattcaacaatttttcttgggcacctgttcactacatactaacatgtcatagtttctgtaccacatcagtgaataacacagaaatataaggttgctttctgagtctttctgaaggccacattccaatagtggcaggaagtagagagggaatgaggaacaaacaataaaaaatgaataaattatatgacatgatagaaatgacaaatgctctgaaactgtgggacagcctgagtggtttagtcacaagtagtcaagggtttggtcttgcagaaggtgggatttcaccaaagactttagaaagacaggagatgtgtcagaaaagcatccctgctagaggattccaaaacaagtgtgccagatgtgttggcagagaatctagaaagccaaggtcctgtcttagctttaaaggtctagagaacaaggttttaatgataaaaatgtttgaaattgtgtgaacttatcagtgcagagagtggagcatttgagaaatagggacttctctgaattcagatacttccaaaagacactactgtgaagggattgaacaacaaagacacagggggcagaaagcgagtgagtcacccagggtaggaccatagagatctttttgaactccatctcctgtttagagtctgatacttccatgccagtcagactcactgtcttaatcctgcttggcaaggacccagcaaaatgctgttaaggatgctggctggtgtagtcacttccattgctgttttctgaacttgttgttgttgttgttgttgttgttgttgttgttgttgttgttttaactgaccagagatgtgctgggggtttagtcacaattccaagtcatttacttatttactgtggaaatttattaggtaagctgttgtttagcaaattcaaattcatcacattacactttttacttagcagaatcacttcattagtgccttattactggaattgactgtcaattatgtggttaatccatttacttaagaaatgaatttttttaatctaggcaaagtaattcaaagcccattgttaactcttcaatgattaaagattgctgtcaatgccaatttatgtcatcaggaaacttacacgtttattccccttgaaatatcagatgctggaaaaacactatgtaaaagtatagagagtgtagcctaggacctactataaattagaagcattcactaaatagaccaggagaactggcaaagctaaacaaaatcaggaagctttgcttgtacccattggaataaattattataataaaagcacacacatttttttaagtttataaatttttgttttaactgtacttttgggttctcacaaaaacattgtgagataattttaagatatgtgattggcagcctataggatgaccccagtgattcttgctgaatattctgtccatgtatcatccccttcctgtgagtgagggctacatctgtgactggcttctcacgcatggacaatgacatgattaaatgataaaaatgtcccttgggtccgaccatcagtatttgtgtgtcctcgagggaaaccatcagcttctggttgtgtgagttctatttggtcaccattcaactatatcacactgaacattttcacttatgaaagcagaaaggaaacatagtcaattttatgagaaactgcaggacactgcacaaacaattgtattatttcctagaagttccctgctgaactgtccagtcccttgccactcaaagtgtgctcgataactagcatcctcagtgtcactgaagggcagctagccatgcatattcttaagctccgtgccacatctacataaccagaatcatttcacactatctcagagacatagagttcagggaacattagtctaattcaatatactagtcaagtctaagataaacagagttgaggaaaatgagataattcagtggcaaactttggatgaagagtctggtcttggaattcctaaatggttctttctcctctatcaaagttacattgtctatgtagcaaaccgtacccacaaacgcttcctaagtatccagggtacagtttgaaatggacaaggaaatcttctaccttgttataaatttacattttctctcccgggcaaggttagtcatttcattttctctctttcttcccatcaataaaagacaaagtcacctgtcaaactggagattgtaaaacctgtcaaaattgaaactttctagtttagctaaatattactctgcaactattttgcatgtctttgtcttattacaattttgatgaatgagagagaaaataagcctgtttctttagaggaaaacattacttagaagtttattgtttcctccctcctatcagtgtgagagttttggaagttagagataaaacacacacacaaacacacatacacacacacacacacacacactgctgatctgagttttcagtgtgtacacagtaactttaggaccaatgagaaacttcagataatgtctagcctaagctgacatcacactgacatgagagatggatgctgaatctgggtgggactaaacccactagaagcatactttttggtaaatgtggcttgctcactccttcacactttctaagacaaaaaaataaaaaatagaagcaggagcattaagacagtagacagcccttgccatgttttccagcaggttagaggacagacctttggcagaacaatatactggtaccaactcatgtcccagagatagactggtgcaacaggtttgtggcatctattgtcacagagcttacagccagctaaaggaaacagatatgagacagcttcactgccagtcagtcactcttgctattcatgaagatgacatatgtccaaaaagatgcactgtaattcatgaatgtgatgcaattgtcagggtataatgtaggaccctcatatggaaacagacagcggtgtctttcttgatatctttattcagaaaaggaaaaaaaaagtagataatcatcacctagagtcttctgctaatattttactagacttattttgtcatctatctccttatccattaatccatcttgattatattatgcttgtcaaagagagtttcagacatccgtacatttcccctttcttctggtactcaactgtacatcactcaggaatctatttttttccctttgaaatgttttttttttctgaaaatagattcttctctcatatactacatcctgaccacagttttccctcactccacacctcctagctccctcctgcctcctctcttcccccagatccactcccactccatttccttttcaggaggaagatcagacccccaagagacaacagccagacaagacaaaacaagatataataagacaagtgaaaaccctcatattgaggccagataaggcaacccaataggaggaaaagagtcttcagagcaagcaagtgagtcagagatacagtctttctcactgtttggagtctcacaagaacaccacgctaacagccacagcatatatgtagagaacctggtgcagacccagggcatctttggaattgtggccatgatgttttcagccactaagagggacaggtaccagataggaccctggtcatggagagaaggatccctcttttccttctctgtcatattaacagagatatgatggccaaacatgtccctgtcttcaaagattttttctaattgaagtaacagcttcactcattatatcattttcaagtatatcgaatttcctatgcagattgttcaagttgtcaacagtctatcttagttacttttccatcattgtgctaagaaaccatgaccaaagcaagagaataaaataaatgtattgggcctacagttttagagagtgagtccataattatcatggcagagagcatggagcatgtaagcagacatggcactggagaagcatctgagagcttatatcttgatctacaagcatgaggcagagagacccacacttcctccaacaaggccacacctcttaatccttcccaaatagttccactatttggagatcaaacattcaaatatgtgagcccatggggtgagggtggttctcaattaaagcaccacacagtcctagcaaacacaggatctctcttggagaataagcaactaaggctgtcgtgggagcaatggcttggaccaaagtatataaggcaacatgaattttcctttgactatttattttaatgctggttgttattctgtcaaaaacagcaatgacatcaggtcccatctgcagtcccttgtgaagcctcaatcaatccttttatctatgactcattctcttcctcatataatctcattcttactttatacataaatgtttcctaaataccacccccaagttgtccttttgtgcttacagaaatatcaaaactgcacaaattacatgtcttcattacttctgcctgtagtaaattactgaccaagatatatttttcagatttccttgcagattttatttgcactagcatgtcacagacacatactgatgttccataaaattcgcagcgatagtcattcttctggtgttcaacaatgctacacttcttcctttgcacattccagtctcccctggtaaaccatacactctctgaaaggccagtccctatcagccaacatttttaccacatcttgttattggtttgtacagcatttttgaatggtatttcattgtctgctttggggtattttttttttgaggtgaaagttcagcatttttttcaggtccattattttctaacataaatgactctgaaagtaaaactgaatagagcacatacaagaatggaacagcagacatatcttactaaaaggactcttgttcccactgagctaaaacatcttaaaagcccacaattatagcccttcctctttgtggtccaacaatatgtttgcagactcccataggcaacctccagcttgattccttacttcccagttagaacagtaagtggttaagaccacagaacacccttcacatggcttctggctcaccgaacacccttcattttggcttcaattatattaagtgtataaaacccatgcggcagaacactggtattagctcttctgctatttcccgctgactttcatgaaattgtgacaaaaagagaaatcaaagttaaaaaaaaaaaaaaacgtaatagtgaaactcattcaccaaatgaaatcctctcgggaagtctatcttttaaaacattttataaaggcagttagatatggttagagcagaagtagaaggaagcagggcatactcacgcatgcacgagcttgagtgtgcgcgcgcgcacacacacacacacacacacatgcataaagcccttcccaatgccccagttcactctgctccacaaaagaacctctgaagcaggtctgctttcccannnnnnnnnnnnnnnnnnnnnnnnnnnnnnnnnnnnnnnnnnnnnnnnnnnnnnnnnnnnnnnnnnnnnnnnnnnnnnnnnnnnnnnnnnnnnnnnnnnnnnnnnnnnnnnnnnnnnnnnnnnnnnnnnnnnnnnnnnnnnnnnnnnnnnnnnnnnnnnnnnnnnnnnnnnnnnnnnnnnnnnnnnnnnnnnnnnnnnnnnnnnnnnnnnnnnnnnnnnnnnnnnnnnnnnnnnnnatgggtgaaacttcttacttggatatctactcaaaacaaaacttaacaaccccaactgtcaatcgcccacaccagtcaaaaccagtggtctttaatcagaagcatgcgggtcactgggtcactgctgtcaaataatgaccacaatgtcagctgactattgtggtcccatgagagcctacatttgagggccactggaagagatgggaacccatctttgagaccctgacaacatggagtatttctcaaaaacacttgcttgttttcatcgttgctatagtcactagccctcagcgtagacacaggaaagaggcaccatggccagtgttaagttgcaggatagactcttggaacaaaaccgtctctgtgtctagattactgtctatccatttcctgactaaatgttctactatagttctgcaggtttcggctttgggagaaggtaggggaaggacatagagaagcctcatatctgatatcatcactatacattgcccatactgtctggccctgaccttgtccacagcagtactgtgtccagtatggctttcccttggcattcctccttcaccaactacgcatgctctaccactctagcattagctaaccagtttatctgtcattttctccacaatcatttttttttgtaaaaggtttgttattagtttactattcccaaagctagaagacaggtttgcttttgtttcagcctctttcctgtatccttaatgtctccctatcccatcaccttcatttcggggatgttttatatactttctgctctcaaggactctatttttcatctctagaagttggttttgtatttttcaagtctgcctctctgtctctgctctgtgtcttgtatcgttacacattcatatttcttcctccccccacaaccctcactttaatccatccaaatgtatttattttatggtgtctacaattgttttattattttcaattcttgggaggcatgtttcttagcatcatgtctacagcttctcccctcacggggataaacttgtcatctatattttatttttcaactctgagttcatctttagtggaggtggtgttgttccaagataaccaactaatgtgccttagattataaaagtgcctctacagactggttgctcatttgcctgtaagatcagcgagatttctagtggtcttggggtttataaataaattctaggtttacagtagctctgtcacacaagtaacaagtgttttggtgtgtgtgtgtgtgtgtgtgtgtgtgtgtgtgtgtgtgtgtactcacacatgccgcacacaccaggcacacatatgcactccagtatgtgatatgtactctagtgtgcttgtgctaacatgtagaggcaagaggaggtcctcacctctcctgctctaacacagcctatgccttgttccctttagacaggatctctcacggaacctggttagcctaggctgacagccaacaagcaccagaaatcttcccgctcctctgttcctcccagtgttaggatgacagctataaatagctatgccaactttttacatgggagctgggatccattcttgccctgtttgtgcttgtgcatcaagattgagcttgtctgagcaaccagaccacatatatatcgcccccagagtatcacgtgatagaacttcaacccagggttttcttccttctggtgtttgtttgtttgtttgtttgtatttgaaacctgtacgcttttcattttacatgctgatctcgttgacttacccaaatacaaatacaacatgttgagagaaattacatactctaacagcaacaatattaaaatattacacattgattgtaatacatgaaagataaaagaagtttacatagtttttatttcttattatacattgggttttactgataaaattagaaattttagtcatgaaattttgtagtattttttttgtatggctttttctcaaggttttgatcttcattctatttaacagtcaccatacctctatttaagctcatatctctatttaactgagttttcgctgtttaatgtattcgtattggttcttttttgttgttgtttttgttgttgttttttgattttagagacagggtttctccgtgtagccctggctgctgtcctagaactcactcggtagaccaggctggcctcgaactcagaaatccacctgcctctgcctcccgagtgctgggattaaaggcgtgtgccgccacacccggctttgtttcttttattagatgaattctttggttctttgtgtgtgtgtgtgtgtgtgtgtgtgtgtgtgtgtgtgtgtgtgttatgtcgttttgttttgtttcaattttaaggtctttttttttctggaattctatcttttgcttgtttctcacctgtctaacgctctggaaaagaaacaaccagtacaactctggaagctcggtgtgccagagaaggcatttctataaccctacacgtggaaaaagaacttatttcagtatgtaatcttggatccatgcctttttcccttcaagaactttatgtaaattacttctggcctttaagactgggccagagaagatgcaataatgctgtttcttttattttagaaattgttgggggttttagttggtttgcttgcttgcttgcttgctttttcagcctaaatgtttgtctgagccattctacatcatgacattttaagacctggattggatttaggttctgatttttaattttatggggaaaaactgtacttggaggtctttttttggtttggggctgttgggttttgggaggttggtttgggtgtttgtttgtttgtttgcttgcttgcttttctgccaggagctgtgtctacatggagctctgtctcataactcctgtccacttactctgctcttttcttttgtaacacaattacccattgtctacatgtctgttttcactcacacacacacacacacacacacacacacacacacacacacaagtataatgatgaaataaaagaactcgtgtgtacatgcacacatatatgcatacaaactgtagacccactaaatgttggtcaactgcttcttctaagtgtgaggcctgccttcctggagtaattgatatacctagtgttactcaatggagaaaaccaatctttcctctcctagaaggcataaataaataaattacagtttggtaattaacctttaccctagtggctagagttgcatttgttgtttgaaagaatatataataaaatataatagggtaaaacaaaaaccatcacctcaacattggacaggaacaagggaaagaaacgagccaaagaaagggcataggaatcaaagacccacttatttccatactcagaaatcccatacaaacagtgtgatggtttgtatatctttggaccagggactggcaccatttgaaggtgtggccttgttggaataggtgtgacctggttggaatgggtgtgtcactgtgggtgtgggtataagatcctcaccctagttgcttggaagtcagtcttccactaacagcctttggatgaaggcatagaactctcagctcctcctgcgccatgcctgcctagatactgccatgctcccaccttgatgataatggactgagcctctgaatatgtaagccagccccaattaacttgccttggtcatggtgtctgttcatagcagtaaaaccctgactaatacaaacagtaaactggaaaccatgatataagcacagaggacctggtgccaacctgtgcggctcctgtgaatgttgctgcctcagactctgggtttgtatgagctttgctcatgttgatttagacatccttattttcttggtgtcctccatcctctctggctcttacactcttcctgcctcctcttccacagcctttcctgagctctgagtggagagatttgatggagatatcttatttagggctgagtgtcctatagtctctcattctctgtgtaatgtttggctgtgtgtttctagatttgtccccatctgctctaggaggaagcttctctgaggatgtctgagtaaggttctcatctacaagcacagcagaatatcattttatcactatattttttaagaccaatattatttggatttaccttaagttcctgggatgactcgtctagggttcttggtcaccagtgcagtgttgggtatgcgttctaactcacagagtaaggcttaaatccaatcagctatttggtggttactctcacaagctttgggccaccattgtcccagcctatcttgcagatagtacaccattctgaataaagggcttgtggctggcttggtgtttatgttctttttttagagtaggcagactacctgcctgtacccaatacacaggaacataaagatgaaggctgtctgtaggcactagctctatcatggtcaacgaggtttgtaggtgttatcttcaacaatggggccttgctgtcaatttgtggagagcagcctatagtctggacaacctagttgtttattgattcctgtggaaccctttgggacaacaacttagctaaatgtaacccaatcccagtactggaagcttcatttggtgacaatagataggcagttgagaccctgccacctccaatattggcaacttcatttagtttgacttcatacgtgtatatattttaggaggtgtctactgttgtgtttataaaaagataaaggagaaaaggaatacgttttggtggatatgtggtaaggtgtgggatagggggtggctacatggacccatgctgaggcatcccttagccccgagggaccagtcacaaaatggtaaaatatagaatagagtttattctaccaaggcatgggaagggggggttgagaggatagtagagacagataaaggcagaggagaggtggggcaagaggggaagggaaggggaggggannnnnnnnnnnnnnnnnnnnnnnnnnnnnnnnnnnnnnnnnnnnnnnnnnnnnnnnnnnnnnnnnnnnnnnnnnnnnnnnnnnnnnnnnnnnnnnnnnnnnnnnnnnnnnnnnnnnnnnnnnnnnnnnnnnnnnnnnnnnnnnnnnnnnnnnnnnnnnnnnnnnnnnnnnnnnnnnnnnntgtactgaacatgctcaacgggaaaaagaaactgtcttactaatcttgcctttcctttatttctacatatgctctcaaacttgactttctaagattttctaagattttagagatgcattttcaaaatgtattttgctttctatgatataagctaatatgctctaaatagaagaagccatgtcagattgactgcaatgaaaagttagtgaattgtctaacagtaatacaaaaatgaggatcagaatacgttccagatgggttttcaggacccaagttctttcagttcttcaaatagcatctcatcttacattggtgccaccccaaagctgtctcccagcatgaagacttgactattttagaagttttgttcatcagacccagacatgatggtatctaactgcaaagacaggtagctggataagccttctcagctataaaaatgttcctaagactttcctccaatttcattgactgggcaggacctataaggagcattaggacaccccaattgacataaagaaatcaggatattctcatggatcttggaataagttcctgagctatatcagggaggtataagcatccaaattaacttggggtccctaccagccagaaaagctcttcagcaaagagtaaacacaggctgctattcttctaaatagtgtgatttaaaaaaaaaaaaaagaacataaattttcttacagctagctaacatggtgcatttttcatgagatcctattcttgtctcatttgtgcttatataattttaaagaaaagaggagtttctctggtgtttgtcagtaaatacggcaactacgctgcctttgttttacactggtgacttttgcgcttcttctcttgtgaggtaagcagaagcaatggtcattcacagcccccatgccaatgcatgagccttgacccttgcccccggcacaagtactcaaggagcagtacaagctccccctcagaggagaggcatggattctcatcagaaagaacatcacaggattagcatcttggacacaagggtgctttggtcggtctttgtctctgtcaaagattgcagtggagaggtttgagggggagagaacaccagggcaggtgctacttctcatttggttgttggtgtctttgatttctctgatcctggaaagaaagaagaagttgagatgtttcttttctgttcttcagaccagtgatttttttttctttttaaccttgaggaacaaagacttttgatatgagaactcaaatatgtcatgatcatttcagctctaaaaaacacatgcacaccaggtaacattctacatgctgttttttacatgttcaattagacccatttggtcaagtacatgaaagcgatacttgagtctaccagaacattgagtgatagcagttcatcaactgggtatgagatagccatgtgtagtgagcggccctccctgataggccacaaatctcatgtatccatcctagaataagtctcgatctcaaaaaaaggggggggtcataattttgtataatatgacatcaaaccacaatccaactgcttcatcttctgatttaacaaaaatcaaacaaaagcaacaaaaaacataattgcttccaactcaaggtggtgggaagtcagaactgcctgaagctggaaagattattttatataaatgcagagattctaaagaaattttgacgtttttatctttgtgcatatgttaagtatgatggtgctataatacacagatactcctcccaaattctggcacttaggttggttgacagacagatttcagttctatggtgagtttatcatatggttgtattgctgtttgctgagagaggggaaggaagaaagccatctcctgctggcctggtactacctggagactttctacagtggaatcccatttaacctctgcaatgaccatctagatgataatggattgaagacgatgatggtgacatgtaatcatggtcatcaccatcagggattacaaacaaaaattttaggccctctataacttatttgaggtctcatagctgccaagttgtgaatttcctgtttgaagccaaggttttctcaaaccttgtgctttgactatcccactctattcccactgtactggttctgctcacatccccacagcaagcaggtgatccagcctcctcctcctttaacaccctgtctcctctcagactctgtgctcccagcaagtagtctagatatttgccatccagtctctgtgttttcctgccctaaagggcacatggatttgaaaagcattttgatagatgtgataagagactgatagtggtatcagaaattacaggaatttggttgactggttcagacatttttgtcttgactctgtgaagacttttggtgaaaatgacttgactgtttaaagcgaacctataaaagcagaaaagaggtattaggatactgagagagtgctcctgtcagaaggacccaaatcaggcagaagcagtgggaaaggaagagagcagaatgaaatcaaggataggagaaagaagctactctgctgtatttgtctttgttgttgttgttcattgctataacaaaatacctgaggctagatattttataaagcaaatcaattcattttgctcatttttggatgctgaaaatctcctttgctcactgctgagggtcccttggtaccccctaactatattttagcatatcagaaggtatcatgacagaaacacactcatatggtgagaaaggaaggcagtgaaagggtacaggccagttttgctctcagtaacaaccctctccagtattgaagtcaccaggaaactatcttctctcactattgacactttgaaaaccattggggaacctcatttaaaccatatgtaaactgaaaccaatgcccagaagaccacctggattccttccattgtgtgcattctcatgtgcctttgggacattgtgcataatatccctaacacagcttccattctttcatttggtaataggtattgtattgttcagaggagttatcaccctttctgtctttgagtcctcacacttatctctccagtgtggaggagaatgggcagagaaacggaggctcagaaaatctaccacttggcctaggtcacagaattatgattgctcaacccaggatcccagccctgttctgtcaggacccaaactcagcatctttcagactgtagactctgaccatttctgaaataattctgcaaacattttaaccaagactaaaatgaaactccacctgcccatgattttatatggtaccttcattcataatgaagccaagtttcaaaaatgactaactgctgtccaattgcagctagttacgttcaaagtcattgaaattacagatgtatgccttcagtcacattgtctacattttaagtgttcagtagctatgggtggcaaggagctgccttgctgaatggtgaaacgacacaagccttctgtcgttgtacaaagttttattgcagagtacttgggctagagctgtcttacataagaccaatatctctttatttagagtttactcaagctctaaataatccctctttaggattttatctggctctagataggtctctgtgtgcctgcattgtccgacaccatagccattagtcaccagtgtcttctgagccctggaaatatgacctttgtgactgaaatactccagaagtgtaaggtacacactagatttcaaagcttttctatcaataaagaatataacagatagcattaataattttacactgagcatatgttgaaatattactttacatgtcttgagttaaaaaaatactgttgaaattaatgaccgatgttcatttttaaaaaaaaaatgtatttaatgttgctacaagaacaatttcaattatatccatggcatgtctagtacttcctccagacaggctgctgtagatccctttacccatctatttgactccaaaacacaattcttttttctgtcttccttgagatctttgctgtccagtaggtacccatatgccacacgtgggtatttcttctctttatgcctgtgagtgaatatattcctatgtgtctgcaagggtgtaagtgtgcggggtgaggatatgagtctgtttgtaggaagccagaggtcaacactgcatatcttattctctcatttccactatatcctttaagactgcattcctcattgaacttggaggtttcttctctgccttcagccagccagcacagtccagccatctctggctccccagcccagggattccatatgtatggcaccttgtctggctgtttcattttacgtggattcttgggggaccaaacttgggacctcctgcttgttcagcaagcacggtactgagtaagccatctcttgtgctcctgcatgtggatgcttctagtgaacttaattgaaactaaacaaaatttaaaatttgcttcctctgtcacattagccacagttctgttcctcagcagttacatgtagttaatggctaccatattgcaaggcacagatggaaaatgtctctattgtcacagaaagttttatcaggtggtacccacatagattgcatacagagatatcacgaggcacagaggtgaatgatgaaggatacagctggtttccatggcatctaaccctgcagcacatagtcctccatctcctaggtacctgcttagcctcattaggctgtgtacaacttatctcttcatctgccttcctgcaagtgctttatctccactgcaacactcctcacctcacccacccaccgctgtgtcctgtgtgtacgtacatgtggctaacttggtgctttgaataagacaggtatataggaagtatttgttaactaattgaagcggcaatgttaatcaaatgattggaacacagtggctgaaactacatggaagactggtagcagaatataggagatagggggctagagggaaggactatgccaggatcctatggaggaaagaagaggagctagcagaaagacagaagagaggaaaacaaagagaaggatagataactgttaacccaaatcttttcagtatgacccaaagctttcttgaacccatctcacaagctccctacatagtgatgagaggtcttacacagactcagaaagtagctctgtaagaagtacagaagaaacaccaaatattatttacatgatccataaatatgcaagacctataaatgcagaatatgaaaattgaaggcctgatgaggagggaaaatgaaaaatggcctctccctgggccagctggtttgagttacattttatgggcagtgtgtgaattctggcgcccttgttgaatttgcggcagactcgcacattagttttaaggctccctctcgaataggaacatcataacgctttttaattggtgctgataaaaaacgtagcattacttgtaggttcctgagagaagcgagttgtgaaattgagttttcattaaacctaatgacggaaaattaagcatggtgcgtctggcgaaatgggccgtgataaaaggcgtcacttctgcattatcgaaggttaataagggaataggtgaggtaagatccatgggaaaggggagtccaactagttggattaataaaccttgaaaatcccttggttccgagtcctcctggcatcattagtgtgtcgacatcatcacaaatgttgcagcaatacaagtgcttacatttcaaatgcatctatttttccatcccactgttggttttgctgacaccaagtttacagtctgtctagcaatgtgtttaggggaaaatatccatattgatagcctttttagtttgggaacgtttggcgtgtcacaaagatttgccaggtgccaactcccaggaagcctgcctctgccaggcagctggtctcccatacagcctgcaccctgagtgctttagaaaagataggggcagggcatatctctataaagggcacatggtggtgtttatgtggaaaacacaggttctaggcattgacttgatgtcattgtgaagtgtggcatctagaaactcacactcagatctcccttcatgtccatctccactcctatcacacaatcacaggagtgatgctcactggaaagacacctccagtccatgacagctgcgacacccatgggaaagagagtgagtctttaaaaagtgggactctcctgcataaccttcaatggcttcatgctggtcctgagtcctcgtgttctcagcccttctggatcttcttcatgtcgtctgctacagcattataccatggctttgtttataactgtgtgtctgcttttacttaaatgtaccatcatctctcaggctctgatcttttcgcttcagacaatttttccttctagaccctctcataagtctaactcacaatggcaagggtataacagaggaggaactcaacctcaatatgtgccaggaattatatacaatcaatgctagtaaagatgtttcttacttattaccaagccaagggtgggaaggtagggagtactattctttgtgcagccagagagactgttttggtttgttttgttttagcatctcactttggtctttctttcctgtgtatgaacttgtatcctcagtatctttctattggatgattgggctaattccgagaagccaactctgtcttatctactcattgcattaaaacaggacatgttgaaaccatgggaaacacacacatacctcatccactactgaggtctgatccagtcagtgtctcaagcacagggcacaggctcatcaaatccataacttgctctcccatggagatgatagccagtggagtcagacagaaggatggaaagtgaagaatgtgtgtctctgacttatccatgacatagatgaacacatgagggtaaccaagacttgcattctcccagaactgagggggtttccctgaacaatatactttgaataccaatgacaagccaaagaggggttaggcaagtgtgaccaattggtcatcctgtgagccagacatgtctctccagtatcctatcctgtgaggaactgattttgatatcatcacataggagcagactgtgttttcccatagactctgtttgatggattattgtgacaggggagacaaacaagctgaaggggacatggcttttaaaaagacaagttgcagaaaaatctggaatatgcactaagtctctcagggaaaaagcataacacaggcttcatggatgtctgcatgggaatctcaatgtctgaaaacatctggatatacccatcatctgccacatctggaaggccttatctcgtgcatggtacaaacagaatggccccagggcacagactgtcagagtattgaggaggatataaacatgccaagcatagatggtctgggaaagagaaatggtttccaaagcgaccaaacaaccgaacgcatctgaatcagctcatgtagagagatatttttatgagggaaaagtctaactttttttttaataggtagggtctaatatagtcaaagctggcttcaaacttgctatttagtttggggtgagtgaacttctcatcctcctgtttccccattttggatatctaaatagcaagcacttgcaaacctcgtattatatagtgccagggaccaaattcagggctttgcgcatgctcagtggacactaccaactgagggaaaatcccattgctatatcaaggggtgtggaataggacgcccatgagagtgaagaaagaagtttagagaactctacaagttgggatcagaggcatatcagggtcagtggtagtaagggagcatatagatggtagaaagaaggtggactcagtacagagcccattgctacagaggggctggaggattagagggcctgctacctactgggtgcacaagactagctgtacttctccccaatgtacaatgcaaaggaaacaaactaggagagaaatcagatcatagatacacaatcccagaagcagtcaggtggatcttctggccagggacctgagactcccctcacccacagacaagcagctaagactatctatatccatgcctgcagtttcccaaacaagaaggttctcccaggacttagcctggcttcttactggttctgagattagctggtattggccaaggcatttaagaagcctagagaagggctaaggataggacgggcaagggatagtcactaaactgtcactttgtctttaagcaatcaatgagcccttgaagctgaaatgaaccaagaacccttgcaagctctggtttgtaattccaccattcaaatctgggcacaaggccaagtcggggaagcagtatcttttgtctttctatacttttctgaccagtggagtgcacagctccctctgccctcctggagcctcactgggactgggggtgaggtacaaagtacaaaactcctgaagtgatagtttctcctgcttctttttctttgaagcagatggcagccgtggggagctgtctcagcctaccctcaccattcagactcatccctaccggacttgtgaccctgtagagatgagctatccccgggaccagttccagcctgccatccgggtggcggacctgcttcaacacatcacccagatgaagagaggccagggctacgggttcaaggaggaatacgaggtaagagcttagcatgtgggaggattccccaatagctcctaggtacttttggagaactgaagtcctgcctttgaccgtgagcaacaacaaggcttgagagcatagtggaaatgccccaccaggcccacttaaacagaatttacattttaactaggacctagacattaaatttcataattatcattgtatagacgctgatgtgcatggatgcagatctgtatatggagcaaatacctcaggacaaggtgtgttgtttataaagacatgcacaatgttattgtagttggatgagcccttagtcattagaatttgccttgaagtttcaaatagcatcaagaaaactatggactttatcagaaaggtacatatatggccaaagcctaaactacctagtctttaaatctaaaattcaagaagagaaatatagatgcaattgaccattttggtacatttctttcagaacttacattttaactaggacgtagacattaaatttaataattatcatgctccaaacccctaaattttagagtcaaacctttctttactatgaagatcgccctcttcccacatgttgtagagaagccagcatgtctccctgccaatagtctctggcatgcctgctgcttcctgctcacttcttgcctggtgttcatgcttctgtgtgttctcactgtgctccaccaaggccattcaatgcaagtaactgctatgccctctctctatacaccctcattcctccattcctcatgcgttggtcacccctttccccctacaacccctaactccctgtatctctagtacaaaagatatgaatacatgttgtagttatttcaggagtttagtgtatcctttgcaggggttggggctgggggtgggggagaggagagcagtgacagacaaccacagcaaaatatgagaagcaccagagtccaacattattatggtatagattcctcaccatgcaggccctttaaggtctaataaatatcttctcctctatccagtcttctttagcatctttaagcaccacccgctgtgagactccgcattttctttgctttattgtaagaaacaacttctcttcctactgtctttgtctgactccttttgtttcaaatcttacctgctagatttcacctttacagaagaaaagaacaaaggaaaaaaaatccattaagatgttttccttgagcaaagagcagctcacttcctcctccccaacctatcccctaaagtggcacttctctcagtgacagtggagtccagctatagcaacttacttttgctttctctctcctcttctttccccaaacgcctcttcagcattttctatgtgccctgtactaaatggtacccactgggtttctcttcttcattccctgcctccttcctcccttctttatctttcttcttcttctttctatcacttgtagcaatgacccagatacattttgctcagttccactgtatgcagtgaaggcttctcagctcataccacctcagactcagtttatccctcggagtatttccctaggcaggctttctgagtactattgctgatgtcatgggagaacatgaaatcatgctaaacttgtggtccacatatctgggtttcagttgcagtaagcttggaaaatcactttgctatctcaattttcaaattttcaattagttgacacgtgtgcctaagtggctcctaagacctgtatgctcttaaagctttatgggagtataatgtagtggaggggaccatgtttgacatactttgaaaaaaaaaacattaataccagaggatgtaattactagctcaggagaaccagcagttaatttcaaatacagtctcagtcaaataccatatttttgtgtgtgaattcagtctattacatgcatctctgagattcaaaaatccattgcttctttttaaaagtatcaggataaatattgataaaggaaaatggattcgttcacagattgtgtaaaccaagaagaaaaggactcttggttgaggcctttcccaaagtgttgttaccctttaaaagaaaagatgaagcaaaagccaggaggtatgcctatgttcatttaagttgccagaatagtgtgtcctcatatgtcttcccaagaggcaagctcctcctgcggttggaggagccagccaaggctgatttggcctttccctccccacccccacctccccaccccttccagcctgggattcattgggatccatcatttcaagagtctaatagcaaaagggagagtacaaatctttccttcaaatatctcctctcctgccaggatagttataagactaccaattctggaggaatattggaacaagagatacaggtaatgctctcagcacatctgagtcttatttcttaaaagtaagaatggtcctgagcatggtatgtacactgatgcacatggatgcagatctgtatatggagcaaatacctcaggacaaggtgtgttgtttataaaggcatgcccagtgttactgtagttggatggacccttagttatcataatttgtcttgaagtttcaaatagcatcattaaaactatgtattttatcagaaaagtgcatatatggccaaagcctaaactcctagactatgagctttaattctaaaatttaagaagagaaatacagatgcaattgaccattttggtacatttcttaccagcatatttcttctaacgcatccatccctatatgctagttattacttggttggttggttggttggttggttggttggctgatttgctttgctttgcttttaaatttttctttatatctgtcagcatctcccaaagattctagcatggaaagaaacttattttatatcaaagaatacatgttattccatcatttgggcctcaaccataaatctctctaaggaggccagcctcaccctcagttaattcaaattgtattaataggctggctagtgtgtcttgcatctggttaatagcattgtatgattaaccaggagctaattagaagacattgttaattgaaatatcctactttgtagggtgtgctagtccagtttgttagaaagtgactgtggttttcttttatcataagggctcttatgatttctaggatcttcatcttgaacatgaattgcagatctgcttcaagactcagtgtagacataaaaccccgagcctccagctctgctgtcacacagctgctgtgtgatgtccttgcctgtcaccttcccattctcctctgcttttatttttttcataccaatgtgtggatttgacaagctgacatctaagagaccatcagctctagcaagttgtgccttctaaaaccaacgcagctgcagtcacgcccagattcattcagtaaatatttgttgagtgtttactattacccaggagaactctaggcatttgggacacaatagtgagtgaaacaaacccacaccctcatgaagcctgtattctaggaaatagaaaataagcacaggcttaaaaaacaaataaatcgcagtttgctatgttacaaactacctcaaatatgagcaagagaaaacaattgatttattgcaataatcggctccatggtttgggatttgaacaatgaacaagaggtacagtgatctctgaaatgcaaggctccagggctaggggctgaaataatctataacatctttactggtgtctaataatagaatgtagatatcatctaaggtctcattggcagctttccactagaatccctgtaagcaacctcctgagtagcctgggattcctggcagaatagtaacttccaaagcagttggacttcttctatggtgcctcagagcttcaaagacaaacctcctacctaacaaggtaaaaattgcataacattggtggcctagactttgatatcatgttgcgttggattacaagccaaggaaaagctaccctccttctagtgtggaaggtaattagactccccttctttatagaaaaaccacttgccagctctagaagagcacataagattgtagataacatgatttcagggcaatgtggtcttctagaaaaagagaaagtgagacaagggcaggaatagaataatccaggctgagacatgcaggcaggtccaatatcaattaaagtaaaaggatagtcgtctgtccttaggaaggatagataaggaaggagggatttccatagcaaaatggtaatattctggcatgtgcaaacaggagtaaagaaagctgatcaatgtatagtgaacctgtgctaagaatgaaataatcagattggataagtaaagagagacatggtgcttttgtacctctcaggccagtataaagagtttggctttctctctgaataagctggaaacttattacagagctttgagagttacaaatgccaatagtctgaatttatgtttaaaaactcattctagctactgtgttgagaatggaacctgggtaggcaaggtaaggccagtgatgtgataacccagatgggacaatggcgagcatcagcagaggcatccataagaagtggttgggttctgaatatgtcataaagatagacccaacaagatgtcttggtacacaatgtccatgtaaaggaaaggcatcaagactgactcagaagcacttacatgaaccaccagaaagatggaattaccaccaatggtagtgagaaggtacagggaagtccagactgaagcaaatggaagttcatttgagctcagtttgcagcatccaaaaaaagcagtggccatatggctctagagaataacattggtaatcgcaaagtcacaattccagatgaggtcctcggatgtgtcaacagagacaaggaccttggactcagccttttaacagtcccactttagaaagatatagaatgctttccataggctattcactgggcatggtatggggacgaaggagagcagtaaccatgaccccatctgtcaaacctgagcttatgataaagacaggtttatgaactaataattttaattgtaaaatgcattatgtggacaaaatgctacaataaaagaaaacccagaattatagtgacccctgtagatagggtatattcagcgtagcctaaaaatatacttgttagtgattttcataagtacactagtctcaaccaagtgtaaagaaataagaataataaatgaaaacatagaagaatgttctagagaggagctacaagtggtgtcatgggcaagtagaaagtgaattgagtttgtggtactataagtaacaatatataaaatagagaagggtacatggggacagttggggctggagctgtaacaactacatgtccaggaatgggttaatatttcacacactaaggaatttgggttttatttcaggggtcatgggggctatagagggggaagaacttttcaaagtagatttttacttaaaattttgtatcaaagaagagatacttgaggtaagaatacagtcagggcaataaaagatgggactaactggcccaaacctagaggctaagctcagagcccaggtcacacacacacacacacacacacacactgcatataaagctataataaaatcaatttggtctctttgacatgggaacatgagtctttcaatatccatcgtttaagttccactacttgaagtaatccatagatttgtcctgcactgtgagccaaatgcctggattcatatcctaccattttcataaatatgtaggtgaccaacagcaagccattccttgtctctgggtctcatttctgtccttaagcattgaggacaaataggttagtcagagtgatccaaaactccttttgtagctaatattatgagaatcaaactaagaacctattggctagactaattgggtttccttccagtggagtctctgtagctcccttccccattgttatatcacaggatctagttgattaaccatagttcaaagagctcaagaaggactaaggcaaattaacgtcacctgccatgcatatccagttctcagctgagatttttaatcttggcttcaggttagaattacctgggaaaaaatttcaaagcaccagtgcactggccatatttcagaccaattaaagcaaaatgtactatggtgggaccagagatcagtattcaacaagctttctagctgattaaaatatacttcaaaaattactagtcactagcctcaggaaagccttgaagttttcagagtgggccatatctgtgtccacagaccatcactatgcctgtcttattgtctggccctcaaatctccctgtgatagaacacagccactttcaatcaaaggctgtgacacagtcatgaactacagagcctcttcttcttccccattctcctaaccctcgtcaagatgaccccactttttcccagtaaaaacaaacaaacaaaaggctccacagtacaccagaaaatgtgcacagacgttagctagagagcagggttgtctctgtgccctgtaaccagatgagcagaagggcagcaggtttggggaagatgagggagaacaggaagaggtgactttgtgatacaaagaagggaagcatgttaattcccgtccaacccagacagcctgtcactgtaatgaatggaatgagcccagtagggcgaccagaaggtatctgcttatcacagctccattaagactatttaaggaaacaaggaacagctgtgtggaatatgatgtcgtctaataaagagcaaacatgtgttcattttccagctctggccggatgcaccatgtgcatgatttttgaggggagaggccatcttgcttagtcatctgtgggtgatatcagacaggcagcctactaatggagcataaccgtagcagtggaagtttcctgaggagggaaggagtgtaccccagactggtaacagattaacaggacatcttgttcctgggaggaccttgatccagttccttgatttatagatgagagagtttctggggacaagcatgaaggattagtggcagatgctcaagtcataaatggggaaacacggtcattcttctactctgagaaatcataatgacccaaatggaagagccaggctcccacctgttcatctcactctcctggcagggttaaaacaggaagaaaatgagccagatcctggaagtggccgaaagacattgaacccatatggtgtcaaacttggggaagagctcgtgcaggttgacgttgtgaactcagtccctttagtcaatttttatcattcagcttataataatactcataacatagctgaaagcacttgtttatgtttgatatagaaaccctcccaaatgactgcgtgattcccattggattctgtagaaaagttcttgaaccaaaaatcaagacctgaatagtcttagaaagactctttcctgaggtgaatcctagttctatcttctgtgaaatgcttggctggttttgcagtgcttttaaagtttgatagtatatggccttttctaaacactcatcagaaacaccaactgaatgccaaaggtgggctttgtgctattccaggcactggaaattgctaaccagaagaaatgaagaccccatgttaacaaagctcatgacttcaccatagaagagaattccatagtttaactctgtttaaaatgcttcagagctgtagttctcaagcttcttactgctatgagcctttagttcctcgtgtgctggtgaccccagctgtaaaattatttttgttgctactttatagctgtaattttgctactattatgaatcatattataaatatcttgtatgcaaccccgcaagaggttgtgacccataggttgggaacccctgctttagaggagcatggtgtaagcatggtaggaaagaggcaggtggttatgaaggccagtgttattactttatttggacttcttcttacctgtttctaagataaataagaagtgtcccagaagatgtgacactaagctgaagcaaagtagactatgggataaactgtgtgtctgtctgtctgtctgtctgtctgtgtctgtgtgtctgagcatatgcatgtgtgtctgtgtatgtctgtgccatgcctgtggaggccagaagagggcatcagatcctgtggaattacagttgtagatggttgagagtcccctgacttaagtactagaacctgaacttgaatcctctggagaaagagtacccacttctcaccattgagctcttattctgtccccactactggaatacacaaggttataatcatcatctcccacaatgtcaccatcccttctgacgttaaggaaagagtcgttggcccagaaacggcctcctagatgctcatgtgtggtatgtataacagagaatgggcttggagatgggcagaggagacatctgctaccttggagctggaaggatatagaggtgatggtacaaggctctccaccagacttgaaaataaggacaaagtcttaggcttttccccctcaaacatctggaaagcaacatacaaatgtgaaatgtttaattgtactaggaagtactggaaaattttaagcaattagcaatagctatatccaaaatgcaaatcaaaaccaaaatgtgcctaccccagttagaattactgttatcaaatggcaagaaacagaggtgggggtggagcaatatcttgacagttaagaacacttactgttcttgtagaacacctgggatcaattctttagaacccacataacctccagtaccagggcatctgtgggtaccaggcatggatatgatatatatacatgtaggcaaaacatacataaacataagtttttattttaaggaaggaaacaaatgctattggaggatctagaggaagaggaattcccatattgctggtggacatgtaataaacacagccattatggaaaacagtatagatgatctttaaatagctagaaatatactacatacatataatacaatgattctacattgagttatgcatcaaaggaatttaaatcaatgaatagaacagacatcttcactcacaatagctaagatatagaatcagcctagggggttcattggcagataaatgataaaaaaaaatgtggtatgcatactcaatgaaatattcatccatataaatgaaactgtcatttgcagtaatgtgcatgaacaggagaatactgcgtgacgtgaaattagtcaggcctagaaagacagatagcacatggtctcacctaaatgtagaaactaaaatactggttttaaggaagtagagaccacagtggttattagaacctgggaagggtttgaaggagagaaggacggagagagggtggtttgtaggtatttgggctcagttggaaaggaagaacagttttaaaaatctacagtagtgtgactgttttgacaacagttgattgtgtatttcagaatagctacagaagatttgaatattcccaacacaaagaaatgacatctgtctgaggtgacagatatgctaattccccaatctgatcactgtgcattgtatagatggattgaactgtcagtggatactccatagatatacataattagggtgtgccaattaaacataagaatataatttaaaaaaaaaaaaagaatagctcacctcaagaaaaagatactctgtcttatggaaagaaagcagtgcagaaagatcttcacctgtgtgggtggtccctcgggatgggtggagcacctttaactctgagactgagtctcctctcccccagggcatttgctacgtgaaccttccttcttgcttacaacagttctcaaggtttaatatatgttggaagcagccagagttaagaaagggcactgaggcatagggttactgatgccagattctatcaactgagggcatgtatggttgaggggacagcttttattatggataccagaggaagtaaagccagagaaagtgggacgagactggagcagggagaaaaagtactaaacagaacatggccagcagacaggaccaggccacgagagaaatgaaggcaggggatgggagggtgaggagaaaaattatatgggaatgagaagctgggggaagggatcctgtgagctggagtttaggatagggcctgggtgagaagagccaggataccagcttgaactcttcaacctgtatctgtgatggggaggaagcctggagaccagcaggtgctttaggagctaataggcactgcagatccaggttgtgtgtgtgtgtgtgtacacatgtgtgttcgtgcatgtgcatgcacactcatgcatgtgtgtgcatgtcttaagtacacacattttgtgcaggtttgtgtgcatgtgtttgcaatcctatggaaaccaggcgtcagcctcttgggtgttattcctcagtatgcatttccatcttcttcctggagacagagttttccacaggtctggaacttagtgatttcattcatcatcagaccatcaagccccagagatccatttgtctctgtgtgcccggcactgaaaatataaggttactgtactggctagctttgtgtcaacttgacacagctgtagctatcacagagaaaggagcttcaggtgaggaaatgcctccatgagatccaactctaaggcattttctcaattagtgatcaagggggaaaggccccttgtgggtgggaccatctctgggctggtagtcttgggttctataagagagcaggctgagcaagccaggggaggcaagccagtaaagaacatccctccatagcctctgcatcagctccagctccctgacctgcttgagttccagtcctgacttccttggtgatgaacagcaacatggaagtgtaagctgaataaaccctttcctccccaacttgcttcttggtcatgatgtttgtgcaggaatagaaaccctgactaagacagttaccatggccagcttctttttttttttttttttcacatgggttctaagggttgaacttggatcctcatgtttgagcagtaagcattctaccaaattagctatctccctaacccgtgttctttcctgtaacttgaaggtaagatcctactgtataacccaggatggcctcgaactctcaatcctccttgcctcaatctcctacatacaggttgtcattgggccatttaaagaatgttttatgacacatactcaaccattctgactttatccaaggtcccatgacagatgaatacctgcatctttgcaaaaatctgatttcctacttagcttcaccagcagaattcataaatttccctcaaatatttagtgacatggtatgcaataacatttgttctcctgatgccattctgagtagccatcgttagtcatcccctcctgcctcctccatccacgtttataatccccaaggcatatgcttttcagccacagtttgttaaaagcttagcctctgccaaggccaccactaagtcacacagcacctcaaggagaaacagcagatgtagctgcctcaagacacttaactgtcaccttcaaaaatgttcataagatgggtatgtagaaaactacactgtctgtcacaagtacagtcttccttatatctagtggtcctgcattgtcccccacctgcacagatgtccacagtagcccctactatctcataaactcccccagacttcggtagattgaatattaaatgagtccatgaatagactgagactaggatttagactcacagtagataacagaattctccactacctgaaccctatatcttacttagaactcaactcaccccagattcctagagctgcccccactttaaaactaaagacctatattcctaaaatccctttgatttgagaaaaactcagacaggtgttgccaggagtcctcacctttatacttataccaataacttagatttttttgtaggggacacacagtaaattcagagagaaagctactacggcctagcatccacctttgtatgaaggatgatggaaatagtctgtaaccaccttatgcctcaggcattggtccagatgttgtgtgcattacctcaggtaattacaaattgtcacaaagctctgtggaacatgcttcttcatttttacattcaataatttatattttcatttagagaatgcccatgctgtgttttaacgaatgcataggaggatgtaagtaccagcaggatcagtagccctaaggaagaagtaacaaagctgctatcctgctcctcctgtaggctggacgctactcctccactcacaggaagggggtattattgccttagtttccaaaaacagcattgagtcttagatgggaaaatgacttccagtgaaaatattcaggcaaggtagtcagctcacctttctgcctttctgcctttcccccattcacgtgcatagttcaatacgctcaaagcagttcttgacaagcaaggtggatgaccggccctagtaaaatgattccttccttggtgaggactcgggaagtttccttccacagaatacagtgggaacaggaagcaatcctgatgggctgtactggttatggaggaggcaggctcttggctgtgccctgaagcagcatccaggaactggctgatcagcaatcctgaggcctggttttgctgcacctcggggcatttcacatccaattatctcctgggatacaggcaagccaagggaaataaaggaagggctcactcctggcagaagccgccgggttagtggtactgtgggtaaatgaagtggactggcacacctcagcataggatcggaagtcagctcttttctgaaaccgtgttctgaggtctcaccatctggggcttgggtccaaagaagaattaaaagcattataaaggaccctctcagctagttggaataatccaactggtagaaagaaaaaaattagtcaagcaatcattagggataatttttgcttctaaggggagattaaaacaccaagcagggaaacagaggcaggtcactcagacttatagactaagtcagcaggacagagcctaagaaggaatagtctgtgatcgtgtggtctgagcctccccctgacactgtggcatggcaggtgagtcaagagaagagtgcctagtgtaggcgccaatgatcatttcatcatgaaatccatctgatctgtcaacaaatgtgaaggggagtggcaagtgcttcctgctcttatcgcgatgtgacaatggctgtgctttctcccaaagcattcctattgactgagtaaaacccacattctgcccgtgacctgaaagtcttccccagccacacctatgtgctatgtgtccacagaatgtacgcctcttgctatttgtgccctggagagcctccctcaagttctagaataccacaagctcgttctaactcagggcctctgctctagctctccctcagcctggaacacgccacccaactcttgccatggctgacatttgcttatcatttagtttgagatcaaatatgtcatccaaaggcatactccgtgttgaggaagttggggttattgaatagtccaggtgcagtgtgactttccctagggacacatgaacaaatttactaatcccagatagataactgacaataggccaaagaaatgataatggcaagtctagcttagtgaaccattaagtttattgaggttacttatgggagtatgggtgagggttcacctacaggaatatgtatgactcaaaggtaactgtatcataaaaaagaagcccacattgcatactattgactcatagaagccccacccctagttttccccataggatctatagccaacttgactggttggagaatcttctctctttagcaaatattattgcttatatacctttggagaagggccttgtgaatcctctaagtttcagaaacttcttaagacttgtgagatgtttactccttgggccttgtaacatttgctaccttgagtcttgaagatattccctctgactttgaatgtgtcagtttggaagaaatcactgtgcagcatggagagagttgggcctctcgggaaaaggatgtcagaaagggctccaaaatgtgggttgtgctcagtgaaattatagatgcagattgggtgctagatgtggtgttattggacagtttgatacatcttaaccgagagaagaatgtagctggcagaaagacagtgggcatgcctgtcaactgggattgagcgatcgttaggcattttctttgtgctcataaacaatgctcacatttttgtctgtgtttagatgtgactgaagaaaggccttgcaattgtcccttcccatcctgacattcagaagggctcttttctctgactggtttctgtgaaattttttatgctcagcagaagagccctggagctcagttgtgagtaccaggctagcttgccagtatcaaggtccacttttctcctcgtcaaatgttaccttttcaaacaatcctgcccaaacctctctatctgggttgttctttatccctggttactgtctccctgtgcaccctgctcgtggtcttcacagcatacatcgcaaacggcaatcacttgttctgtgtgcatggcatctgcctctctccccacagtgaatgtggttcatgaaatagcatcatttgcatctaatgtcatcatcatctctagaacctggtatagaacctagcctcaaatgcccacagaggaaggaggtgcatgcaggagaaacacattctcccatgttgctgagcaactgcttccctgcctccagacctcacttcctgaggttatgcaataatctaggtttttttggttttttttctctcaaaagaccttttcaaatcagacttttgaggatgttgtgaatacccaaggctcagctctccagggacaaggacatcctcaaacacatcttttgagcagaaattaagtgactgccttgggaaaggaacactgggggagagtgggaaatagttctacactcagaggggaatgcaaaagtagggcttcacactttaaggagaaagaacaagaaaagggaaccagagattgataatagaggagtataacgaggtggcaattttggtttcaaaagaatgtgattagctcctaatgactgccaccattccctggtcaatctactgtaactagccactaatgtaaaaataatgcccctggctccttcactttgaagactgagatgagtctccctttcatgcttttacccctcagatttgttttcttgaagagattatctctattagactgcagctacctaagaagggaaacatatgggtgatcaaagtctgccaattaggagccattaccacctctctctcgggtggctctattaggcacaccttctatatttgtcaacaccatcacacacacacacacacacacacacacacacacacacacacacacacactatccctggtctccttatgccttgctaaggggagatagtggttcagggtctgtagtgggtacctgtgtatatttctcatggggaaagagcccttaatcactataattgttatgttgagcataggcttgccctgggataggtttggcttggcttgtccccaaggccatggctttaatgttaagcagtggttaggatggacctccttgggctttgcagtgttgccatacagagggtttatgcttattctgtggggccccaggaggcaggccaaggcaaagcccagggccagagtaagaagaaatctagtcagtgatgcttctcaaaagacaggcaggaaactgtggcacagagagttgtctatcactgagggggtcccagcaattggtactgttaatcacctgatcaggaagctgcctgaaggccagtgttggcagggcaattctcaaggtcaccgatggctctgcaactccaagatcttgccgtccacaggcacagaactcactgtgttcatttgtcatttcgttcattccaaacttgtcattctaacaatatgaagtacagtctcagcagtgggccctggaaacagaattagaaatgagatgttttgatccttttcctgaagaagcccgtggccaagctggaaggcaggcttttgggttattgtgtgtagagttcttcgtgtgaaaatatctagaagtgactgactccatctgaggacacaaagaggaagggcaagcagaaagactacacaaagaagaagaagcttggacggggtcttgaagatactttgagattttacagaagtaggcaagaacttcaagtagaaagaatatgtgaaaagtctcatggatctgaaggcctttgtacacagcaagaagtaagggtgaaagtctatttgggttgaagtcataaaaaagccagctaatgaaacaatttggaatttatcctgaagacaatgaaaagaggaataattgggcttgatcacgttttacaatgatccctctgattataatggagggtaaatagaaggaacaaaaccaatgtcagggcactgaagagaagactcatggaaaattgtctctgccattttcacaagaaatcccatgggagctttaatcattgactgtgtccacagtttatcacagacagtgccctagctgatctggaacaactccttggccttaagcgattgaaaccaccccgaagcaatattaacatgcagccataaagagaacttaaccttaactgtcaccgaaattctgacacatagcacatactaaacatattttctcattagatccacatgaaaatagtctgccccaccaccatgttggaatgaacagtgaacttttatcacagagaattgcaaacggataacctactgcccccaaatcagcccaaatatcatgaaagacaatgttgtcattaagaccctgacacacagaactatacctggcaggctcaccggtgggagtggggcttcctggtcaggagacaggatgggcttggaagctgagttaggcatgggaccaagaagcatctgtgagctaaagatagcctaagccaagggatgaatggttacagggatgcttggtacccagagggcaatttgccttgtttcccctttaagaaacctacctaagggtgtgataaacacaaagagtagcattctgagtcaattgtagctgaaaagataccttagagctcaattggagagtgcagctttgcacaggaagcccaggcaaaggcctttcacctgtgcctttcagtggctacagaaggaatcaatgacagaccccagttctacatatccatccactgcatagatgaagcccgtgatcatgctaggaaaataaaggtcagcaaaccacagacacaagataagcccatatttacaaacacctatgcttataaatatacatttcctggaatacagccatgtctgcatttgcctatggctgtgactactctacaaccagagagctgggtgtgattataggctctggccaaatatgttatatagattttcacagacccatcttgcaagttacccttgctattagaagacccaccaaagttgggactttgaagtgcatatgggacttgaagcaggaaaggttccactgtgcacaaacactactttttcatacccagtggccctgcctatctctgagaccatgatctgctgaatgactgaacttctggctaatttgtgagggctaattagacctagtaaggaatagatgggtacagctaatgctgacttgcaaattctgtgtcccaagtaatacaaggaacatgggcaggacattcgtcctgtcctcctgtggggaaggatagagaccctcatcaaaatagggtttgtcctgcatactgttgtaggcttcataaagctgtttccactatccataaaggctcatttatctcgtctgtgaggggactggctacatattccctttgttctagatcacttggcactcaactcccttaaaccatccacaagggtgatcacctggctgtcagtaacattactgcaccctctttaactgatagatgacttctgccccctacccctctttaagctgtaaagctttgtatcaaacttcctgatcaacagctcagcttagatgtcttagaggcatctcaaagttgggtgccattatcatttttactcatctcaacatattaaaaagacacagtacccactgtggagcactctttaagcacatcatgtatccaaacctcagggctaaattcccacccaatccatcatgcttctcccacagacttctccatttactgaagtaaatgacattcctctggttcgtcaaaccatcgccctagaggccagccttcattcttctttcttccacagttcctgtctacaattcatgtgttagtgccctggacaaatctacacattcatggttctcatgcatgcccacatgatggcttcctctaggaagcatctatgttttgttacctgagggtttcctcgagaccaaagactatccacgttacctacaaagcatggcagaaatgagggttttctaacagttattctccaacagtaatcaaaaggaaaaggaaatactggataagcatttcatctccctcccagttcttcctccctttctggaacaagagccttgaacatgagatgtgcttgtgaaataagcctcagttttgctcctcagtgctacagtggcattctgccctgtcagcttcattctcttgatggactgcttcccccgttctcctaatcatactctttgattgcctccaaatccagccacttatactcaaagccttctctctgcttttgcttcagaggcaacctaaatcagaaacactcaactgaaccaaataagattgcttttctcatgaccactaccactacctactctaacagtccaaatgccatcatgacatatgattacagtaaattcatagccaatcatcctgcttcttctggccttctgagagcctgtgttccacacaagaatatgatagcatatgagatgacctccttgttcagagccctccaatggtgtcccatcacacttctaacaacatgatatattaaccaggaacttcaatgctgggggttcatctggattctcatatcctctctatgagtttccagcttcccattcctccctcactttcatctgtgaacatggttgcttacagccctctgtacctgttcctttccctagaaaatactttctgcttttttcaatgaaactggcttctttaccctatcaagaaatgaatttggatgtgagtttttcacagaaaacttcctaaactgtaagaaatttcaatctttattgctatccacttaccctgctttatttcttcatatcttcattatctaatattggatttgctttgtcctctgctacattgaatactctggagttcttggctactattatgcactctgatatctagaaagggatctaaaacatattaggggatcaatgtgtatctgttgagcatatgaatgaatgaatgaatggctccttactggactagactttaagctcatgatagccacaggatataacaatatttgaaccaatgaacaaaaatggaaggtaccattacaggataaaagccctttatactgagtgtctcacagtaatacttatttcctgttgtttcctcatcaacacttgagaagagttaccatctcatagcatttcaggctatgctaaccactttgtctttgcattgtaggccttaccagaaggacagacagcttcgtgggacacagccaaggaagatgaaaaccgcaataagaatcgatacggaaacatcatatcttgtaggtttccttcagggatgttctatttgttagattttgggaaacatgggagcaacaatggctctttttttctaaggatttgatataaaataatccttatgtttccagctttgggttagtaaatttttacaatgatctcaggaagggatggtaaatctcaaataaagtcggtaacaatcctaagggaggagggaagggggagaggaatagagggactgccacaaacctgactgtcccttactgataatacatctagcacttccagatgatggcatagacagcttgcaaagtagctgacagtttacaagagagcagagttacccccaccaaagtattgagtcaatgatctgataagagttgcccacttcagccttcctgtgatctagtgtagcgcagcccaggccttttgacatctagcccactgagtgaggagcattccttaagatctcagagtaccccaatttgggcaaagaaaggagaaagtggagaatcctaagagacaagttatttctagcacatttcaaagttttgttttaactgtctagacatcaccatagaaaaaaaagctggggaaagaataagacacgggcagattgtaaaggaagaaagaggcagaagttttcgcttagctgtttcctgtgctgatttaggaatgggctctgaatagtggaactaatcagaaaacatttataatttctctcttgcttgcagacagcaagattttttttttacaagtggagtggcagaaagagatattgagatagtcagcaaacatgtattgaggcgtgatgtgtgagcctctgcagaatacttcctgtgctgggcactgggaaatgcttttgttctgggacaggtagctattcactgtgacttgttccccccccccccctctgtttctgtgcattatccaatgtccttgtcaggttgtgagctcagagggggtcccctatctaaaataggtttccaatgccctgttcctagtgatattgcacaaatgtgtaaaaatgcctagagaataaggaagagagcctgactcattgaagacagaaagactcaggccaggggacagaagtcaaaagaagtcaaaatgtattagagatatttaaaagattgtgtgtgtgtgtgtgtgtgtgtgtgtgtgtgtgtgtgtgtgtgtgtgtatggcctcctccatccttgcctgggccatcaacaactgtcccctggatcatgcttagcctcttcccgtcccctccatatccaagtggcccaaactttctacctatctgatccatggcaggacccatgaagatcttcacaacatgacttagataatgccatcttcctattaaaagctcgtcagatgtttcctttcgctcttgagttctcctccttgcaaggccttttccagacccattcacttggactcagtccatcacaggctccttgctaagccacactggctgttgcataactcatgaggttcccatgtctttctacacttcaaggtcaccttgacatagtccattttctctatcagagtacccttcccttctctttgacttgcaaatatcacttcttctctgactctcagctaaagtcactctctaggggaatttctctgaccctaatcatgtagacaagcccccatttttcagccccagagctcggtgtcttctgttcaccttggccattgtcatccttgtaccttgagaggcattcatctgagcctgcctacttgcctcctagatctgcttcacagcagcagaaccacagccatcttgcatttttatttccccaaatattctatatgacagagtctaaaaataagaattgaatataggaccatcctataggtcatgagcgttgggttgttctgtgctatatccccaaactgatagtgaacaccttggaaagacaactgaatgaggctggatggagccagcagtgggatgataagtcccaagacagaagaccagagggaatgcaggacctaggaaggagagagggacacactattcctgctgaaggccccagttgagagtcaagaatgcagaaagtggcatgactggagttgaactccattgctggggtgacttcccaggacctatatccatatcacttgctgtatagaagcatcaatggcagaatgggtaccagaggcagaatcatgataacaggaatcaggtgtccagggccactactctaggaagctgcaatctagctgtggatgctctatgtgagatatttaaaagattgtgtgtgtgtgtgtgtgtgtgtgtgtgtgtgtgtgtgtgtgtgtctcctttttgaagtatgtgctccacatacctcatagttctgccctgccctgttcatatctctttgactaaaggtcttatccaaaggcggggaaggatgctatgcccaagctcaggacagacagcaaatatgaagaatgcacgtgcctgggagaaacctcagccctgaaactcccagttcctcatcagcccatagaaggcttcttccacatctctttttagatttccataaagatcacactgcagttgttcacagaagcagtgagctttacaacagctttctgggatgcctttccccctacccccagacttccagtgggaccctttccttctacagacatatttttgtttaagaattcttgtcttatacccacccatagagaaaaaaatagagatggagaaaatttagaagccttagtagtatccccttggtgatttaaaatgaaacctaatctattttctaattgaggttcaatagctgtagcacatcaggtctagtataggtctgtactgaacccagcagagtcagtcaagataacctgtggatctaaagagcaacacaagacatgaaggggaaccccagggtggggatgaatgcatcctgagttttaatggaacaaacaggttaaagaaaaacagcccaggggcctggaaattgcccctgcccttatatctgtccctctcaaagaccatgcctgcccagccttgataaacagaaatattcttggcacaagaagaaaaccagctgtgattatcatcttaagatacctaggtccccaaaaggccagagtggaggtccaaggcccaggccacaggagcacagaaaagatcaaaaggagaaaggaggagggcaggggctgccatcaaacaacagtgaaagagaaaccttgttaaaaagctctttcttcccaatgaccctatttagaatgtagtaatggagactggccttcccagggagtagaaatggaaaggaagtaaacagggggaatgactgagggaaatgagaacaaagagccctttgctttcaggtagctccagggcagagaccataagcaagaagaaatttcaatagcaaagcatccctctctcactccagccctatgtggactggcaggaaggaaatgactacagaaaaggaaggtgcgaattccataaaatggtacggtcctcaggatcccagcaggaattatatggggcccccagataacatcctttaaagacaagtaatgacaagaaaaatcttgtcattacttctaggaacagagacactagaaagcaccaaggagggagaaatcaccaggacctggagacagaggctacctgagcacaaggatgtcctctggtggcaactccaacaaaggcagctgaggaatgaattccctgaccctgctctcttgcctccacctactctgtgcctttccatcagctagctgaacccagcttgatgccagagagaggtcaccggccagcccagtagctttcaagcttggtcaggagtagctcactttgaagctcattggaatcgctaataatcaggtacccccctggacctccagcatcaaagggcatggggacgacacccaacagttttatttaagctctctagtgatactttgagaatctcttatggtcctcagagaccagcctcctagaccatagagccaggcaaagacgataaagcaggaatgctcacactcatttgctgaggcttttccttaagccttaggggaaatcttagaaaagttgctggggttctggtgtatcggagtcttggacaggaggtcaataagagaaacaagttgtagtctgttaacttcttgtgacctgtagcaagtcccctctatttctctgacctgtttctcacctatgaggttggattccaaggcagcaaacccatattaaaaatgaatggaaatgaaatataaatctgacatggacttttaatgtagagcaggctagcctctgagtttgcaggacaggacatatgtaccaaagatcgtgatacctaaggtcacacagctacacaatgagtctatagggctgccatgacccgagctctgatatatcacctgccaggatgctacatgcttctttcctagggatctccccttcatgaaaccacgtctttgctttccaggagtgtaggttgccaagggactaacttcataacagataatctccatagaatggtgttcccttcctgagatgcagaaaggtcacaatatgcagagaagactccacttccaagaagaactcaggctcagaacatgctgggaggccctctcatacaacaggattccctaaggcttcctggaaaaaaaagctaggatgatgtaatggtcccctgggtcattgctcctgactctcgggttctactctgctttgtcctttctgagggtggcccttggtgggtcctaccagcttttcctagtacagaagtcactggtatcctgccatatcccccagatttccctgttgtccatgcccccaattctactgtcagcatctatgtctttctctgaggatgtatgctggccactggacattcactctctgtaggaaagatcacagtgctggggaattaaatgtcctcaggagttgccttcagctgatagctggtgcaagtggatgtctaagaatcccagcttcccctctctgacgttcacatttcctgtctcctcacagagctctgcaacagggaccagggggacttaatcctgtttgtccagttctggatgatactctcttgccaggttcctttcttcctggtaattgcctggaaatgccctcccaaatcactaatttatttcaactcttccactctggttctgcttcctcagttcctccagaaaggcctcctggtagggcactgcctggtaatgtgcgaaggatgccaagagatgcaatgggagcgacactgtcctctgtcctctctgggtactcttcctttctgtacttctccttccccagggctctgcagtgggagctgcccaactttagctagcatctagcgtggatctgtcaagtccgagagattcacagaatgtatgtgtgtcctccttgtgtggtgcccaagctataccttctgtgtctcaataagggtaattcaatcaagattgaatgtttagacctttagcttcgatgaggtacccaggcagtccctgtggaattacctgcctcctccctacccactcgcgcaagatgatagcattaacatttccaatacttctaggaaatggtttttcagctccacaattcattgtaatgagtcaaatctcttttctctgaaaaattgcacctgtggtttttttataccctttgcagtgcccagaagacaggaggaaagattataaagtatgcaaatgatattctctcccagccccacctctctgaagtgattctctcttgaaacggttgtgacttgtaatgagtgatttattgagttctgtctgatgacagagaaagggagaggaagctgggggcttttttcagttagaattgtgcaaaggagcaaactgaaccctctcctctgtagtaggtgtgaaatgacaagctgtggacaggggaccagtgttggggactgagatgttggtgggaaacaaggaaagtaggtcttgggagtcagttaagttcaccactacatgaagaacctgtcaaccttatactgtgtctgaagtacagaactcatgaagcattgagtttcttatccatgaagtaaggtgcgccatatatatctgagttgctttctttttatcaaatgccacagtgtccatgcagtttccagaataattcatggaacaccttccgctctgcatatagttaagtccctatcccttaacatctgccactgagggtctttggtccacttccagaaaggtctcctggtctttcacaagagagagtgattgatgacaagcttgtcctgaataaccaaacattgagattttcatgctaaaaacagggcatgcaccatcatcatgtgaagaaattgctaagacatataccatgctcagcctcacttgcagtttctgattcagaaaatatggagcagggttcaatgatctgtctgtctagggatcacacttggagatccattggtctataataataataataataataataataataataataataataataataataaagccaattttatatatttgtgttgattcttatagaatatcagatgttatacttgttttcatttcatctctgctacaagtctgcaggaaaatatggttttgaggttatagttgaataaatcaaggttcaaggaatgttatgacctaagccaagtgatatgacaacatagtgaaagagtaggggagtctcaggtttgctttcacaactcagccaatcctttagctctcttctgataaagccaagaactgtctttcagtcttgggataggacaggctgagactgttggtatgatgagggtccagccaggaggagaggaagaattcgatcctgatgcactgccttagatgagtgtataccttagcacatgtaaaggctctgtgacaagaacaaacaactgaagggtccaggttatcagggcagtgtgtggagaggagaaaatgacatgacagtaggttcccaggcaaacagagcatgcctggctttgtggggtgtgataagagtctctgttagtgatgtactttagctgattcatgtcagtgaacaaaagtaaacataatttcaacataattttagtatatctgtagtttgaaattggtgatagtgggaatatttacaccctagaaatcagtaggtatgctatatcacaactctttcttcccttggagagtttataaaacatctgtcaacatcccattggtccacattctaaaacaataaagaaacagatagattgaaggcagagggtgatatcctcccacccctgcagctgtattcatgggatatctccaagtccttcatgtcccctgtaccatctaccaatgcttatttctttcctactcctcatctccttggagaccctgggggatctgggctcttgcaactccatctcccctcacagttggggagcttcttctcctccacatgactcttcataactcttccctttgtctcgactctcaaacactgcatgctaaattagctgtttttcaagcttgcaaaatgtagatagagcataatgaacattctgggctgcttgtaaattacctcgtataagctccttcccatcgttggctgccccatctttctctatgtgcatgtgagtaaacagaattttttatctttctaattacataaagttagaagaagaaagggacacagaataatattagcatttcccagaacagataaataaaccatgagtccactgccactctttgcatcgcctttctggtagacgtgggtctgaattacgtcctctaaggaactcagacatcactcttgtcctctacagataaacagattcatctttgggcagatggacagatggggaagcatcagctttctagattgtctctactgtcaccccaccatgtacctcatatgcagtcccaaacctccattaattgagtccctgctgtatgcccagcactatcctttatttctttaggagcaatttttagctctatagatagtcagtgtggcaggtacagaattgtgtaccatttacatactgtttgccctttcatcaacacttcacactagtgcaaaacgttggttgcagttgatagaccaacattggcccattcttattagttcaagttcataatttatactagagcttgctttgtgtgttgttcagttccagaaaaatgcatatattctaattatagtattttataaaataatttcctttccctaaacatcccctttgctcaacttatttaaacttccttcctcctcttctcagcttccaccaatgactgaggtttttatagactccatggttttgttttgttttgttttgtttttccttttttggagtattatatagttagaaccatatgtaaaatcaacattcaatgtagcctttccagtttggcttctatcacttaacaatatgggtttaagtctcttccatgtcttttctaacatgcgagttcacttctttttatcactgtataatgttccagcatgtagctatggcaccctttatttatccagttcccttctgaggatatgtttgtttgtttccatgcttttacaatcatgacttaatctgctgtaaacatttctgtagagctgttaatgtagacataagattgcagtacattgtgtaaataccaaaacatacaattagtggatcccgtagtgaatggattcttaatcttgtatgaaaaggtcctactgtgtgttttcatcagcaatgaatgggggagcattcctgatccaagcattggcaagtacttggtggcattgtggtcttttgccactgttacatagataatatttcactgtttaaattggcaattcccatagatccttgggtcttggtgatttaatgtgtcactctgctctaacctggctttcttctctgtctcctctgttactgttccccttcataatcagtgatcccagaacaaaagactcttcacaacccaacccccattgagcctactgcaatgccttggctcttttgggatcccctctttcatagtttcctctaagagaaagacttccttgatgcccacggatcaaaccttccttacttttaattcctcagtcacatttcagtacatggggctctctatttcttgctttctataacttgatgtcccacttctatgcatgatttacttccttgaacaaattgccccaaatacttaaggatgaagctcacttgctgtaactctttcttagttccttcaactagggtggcatatagaaggaactcaacaaatatgttcttaataaatgtaaatgttggtagataccctgatggttggagacacatttaatctttaaggatatctgactaaaaatagtttctttcttttgctttgtgtctaatgattttatgcattaaaaaaaaattccctttcaacattttaaaccagaatctctgttcccactgttatggtttccaggcaatcataattcagtaagtaaggagattttgatctgcctccttagcatagcaggcaattcatcagtcttataaataaaacagatttcaaaccactaagtcattaataagaacattgaatggaaacagaatacacatttcccttgtctgcggctttcagattctataactgctggtaatagggcttaatagcctgggtcagaatcaggtctcaatcctactgaatggccatccccaggaagtccccctctctttggtcctgagggtttggggctggggagcactcatttgcacagactccagcagtagttacctctgagatacttggaattccccaggacagtacatcatgttggtagaacagagtggaccttagagagtagctatataatcagttgaagtgcttaacctctgttagcctttcttccttcctgtaaagtcagaatcataatagcacatcactgtgaccatagtaaaatgaagaactgtttgagggctgagtgaataggtaatgtatctcacactgagaacatctaaggatttcaggaaagttttaagttcaaactctcctcaccccagaccccacacttccatctcctgcctattcagagttgtcttctacttactcctccttctagtgactcccactgaaatttttcctccttggagaacagaaaaagggtatccaagcatggtaactgctgcctgttgatgctcataactgattctgagctaatagatatgaatagagtcttatgccagtccatgacccggtttgttcatagctggaccaattcatggcctttcaggaggtgtcacattgcaaggagccagtctgtgcaaaattacttctttgcaaccagggattctcctctttgtgtctacctcctgcccaagaggtccatggtatctctagtcatagcaagttgtctcaactctacatttctgaaaatgtcatcccatgtttccgttcatctgaccttgcaagggtagggaccccttgttgcttttctaaatattctcacttcttaaaagtttttttccctcgctcagccaacaacttctgcagttatccctgactgtgaatactcaaaaggtttgtagctcctagttggagtgctttgaataggagcatgtgaactcagagttaacaggcccccaacttttttatagtcccttatgcagtggtcatatggccagttttcatgcacctccatttgctcatttgtaacaagaactaagggcaccattctgcctctttcctgaggtcactgagagcactcagtgatgtcattcacttgtacactcaccagtactcaatgagtgcctcttgtgtgctaatcgcctttaggggttcaagggctggaacaaggaacaaggtagttaaagcacctatctcaagactctggagcaaatgcgtttgtaaactgaggagtagtgtaaatgtccaaaaggaaaggctagttgtcctcattaaccccaggaggacttagaatgtccacacctctctattccactcactgtgatccccatatctgccctgcagtacgatggaattgttgggggtgggctatgccatagcagattcacaatgatccaggcagcagactaagcatccttccttcccagcagaccaaatcgagatattccttagcacgtgtatattagcctgtcagaattgactttaattaattgcaaagaattagccagccttttctgatggaccatttaaaatgattttaacttggtgttatttgaagccagcatgctattgactaaagccagtacatcttgtttacgtctagattgtgtttgaaaaggcatcttcggcaacatgatttttagttactgatggcctcttttctaatgattcaatcctcagtttaatgatggcattgataacaatatgttaccaacaacctgtctgtaccagtgctccaagggacaaacataaagtagtttgtgtccacggtaaacaggtaaacttactgttttttaaaaaaaagcatgtaaatggagcatatttattctgactccaagactttatgtgcagggtgtacttaggtcacccactcttgttttgtcccatggagcaggcatttccattcccaaattaatgatgaaatcactaagacataggaagcaggagacacacctgctcagatgatgatgagaacataatcaaaataggaagtagaaaaggggtcctttttccagacctgttacctctcagcacctctacttcctgatctgtagttagcataactgtgagaaatggcatggtacctggtatgcagcaactcacaggaggcaactctaaaggagaaaaatattgactccttaccccatagtttctcatctaccactgcctgctttttgtcctctctacagatgaccactctcgagtaaggctgttggtgctggatggagaccctcactcagactacatcaatgccaactacattgacgtgagtatcttgatggagctaggcagctatgacaagagttgactgtccagagctcaagatctaacttataggctgtctttaacttgcccactagaaggtagtcaaaacatgtccaaaggggtgtatttatcccatatattaatttgtatgtgtctgtctgcgaagtcattcgtttgaaggtacaaccatggatgcaacaaaatgttcgaagttctcatcatatgctagatattaccaggcccataaatctaaaattgtcaaggtctctaccctcaaaaataccaggagggataagctaggcacatctgtggtaaactagggtaaactagaatgtgatgattggtataggttcagataaaatactgtcaggattcagagatgggaaagtatcacatcttccatcaggaatgcagacaatgatgtgagtcaaagcttcaactgtaaataaacctcaaaatgaaagtgagggatgatggtcctcacttagagaactgctcttgccaaaaggaaggcacctggaaggaaagaaacaccatctctgtctgagggtgatgcacacgaaacactgggaacactggaaaatgaggttggcacgcgatccttgcttaggaggttgaactctgaaagcaagagaagctgcttttcaaggaaatgcttgaaggtgttggcacatgggggatcccattcattactgagctttataatttatctgctacactggagaaaagatagatcagagagaggagagcctggaactaacaaccaagtaagagagaggctgtccccacattccagacaccactgagaaagagactcagatcaaacaggaagtttgagaagtgtgtgcacagaagtgaaggagtctacaaaagaacaatggccgctctcaccaggtagacatcccagcgtaactgatccaagctgacatctccaggtctcagctcagagcccagagaccttgaagaatgactaaagagattcccactgatccccccagtctctaaaatatatttatagaccagctaggaagtatagtcacatgtcctatgaatagcctcagccagatggtttattagttcaacaagtatttcatcagccttgaacctgacactcccccacttatacagagtgaacactcagccagcagatgccaatccagtctagattggttcacttccttcctcttctcctctatcttgattatggcttggtagatgtgactgacctaagggtgaccaaccacatagatagagtcaagcatgcctgagttgctgaagcttcctggatttcattatgtgaatggaaacacccagcaaaatcacattcctaaaggtactgtcagtccagtgtgggtcatctgtctgttcatcccctcgacattctccactctcttttgctttgcagatagtgattgtgcacttgtgagcaggggcatattgtttagggaaggaggaccgctttctcagtaagagggactgataagacacccagggatgactagaagggagaagccaggaagactctgttctattccttcatgaccacattccaactacacctccagcttccatcagtttgagttccagctccttccaggcagcctcagatcctggactcttttgattactgtcttccattgctcctctaggggtttctgggactgtttttcttaaggttcacccatggttcctctctgccatcatactcccctagaaccagtaaaaccaattctctatgttgtatttcctctgtccaaaatgcccacaacacttttctcttccctactgggtcctgcctaacaaaggacctactgtgtgatcaagatcttgggctagagcttcagcagagataaaaaagaatagtctttgtctctgtcacccttcagttgactctacacggaggaattcagttgtgagcagcttgtctccagcaagaatgtgttgctccaagcatttactgaccaggctattagctttcctctctaataatcatttcacaaatatcaagccgaactttcaccatgtgctagaaatactgataaggattccagatacggattctgttttgtaagaggggtcagatgagtaaagagactttcccagaacagacctgtctgactgaagcctcaagagggagtctgatgaaaagtttcttgaaggagatgacttctcagtcctgcctcagaaagtgacagagaatgagctctgcaagaaagtgttacaataacccaagatttagtgattgcttctcatataccagtatgttaccctaagtagtaattcaactactggatgactctaagtatctcttgccagatgaagaagctgggtctctcatggtaacatatccagaatcacagccaatggtggtaagaaaggagaagttacagtttaaatcaggagtgccaggttttcttctagtaataatatcagtgacagtggtggtagcctattaattcctgtgatatatgctttaagtgagccaacttactaagacttcttagtaatacttcacagtggttcttatcattcacacttagcagatggggaaacagacgtaaagaaattgaaaaaagaaaaagtttgtccaatgtcatatagctggacacaacctggttatgaaccatagctgagtgtcccaacccagtgctcaatcttctggttctgcatctactcctgacatcattccatagcctgcatttagtggaccctcagttagcacatgttgatacaggttagactggttcctttcttttcttccccaccttgaatgtggtcagatcgtattacaattctaaggctatagcacatgtctcaggtaccccagttgccatatctatctagcatttaatatctaaatggaaactccataaacctactttttctagatactttctcatctacggtacagtgaattgctgaccacatgtagaacagagaaattttcatgtcatataggcaacaaatgaaattgctttaaatgcaagtaattctacaataccagtcttaatcaggtctgcaatttctgtcctgttatatcattatgaagtatttttgccagcctttaaagacaggaaaccaggaattgaagttaagagccctgccctaggtcacacagctagactttaattctctgcacagcaagaacacagcacagccccctccctctctttataagaaatagactgtacagactggccaaatgtctctaccacatgctgtcctaataggcagtgtcaggccctgagctatgtctcagtggttagcatcaaggactaatgagactatagtcatgaatcccatccttgttgagcctgttgaatacaggcctttctgatgactaactttgtgactatgagtaaagtatttattcactctgatagctgcatgatgcaataaaaaaaatgccagcctgcaagtatgtggtaactactataaagtactttaccaggtttccaagagaaaataagctggctcacatgtatcaatcagggaacatttactaagagccagaatagtaccaaagcagattaaccagctggactgtgtggggcatcttgaggctagagatggcagagatctcaggagttctgtagctagataagagagtggctataaatgggatagatctgtaaggatactgtaaggatcaggctgtcttgttcttgccaaggagaaatcaacccttgccgacatggcaaagaagaaaccaaaagggtgtatgccccagcctccaactggcctctaagcttttgcttactctcttggttagaaaataccctatagaacccagaagatatgggaacctacattgcaattaatatggtcatttgactaaactgctttggctcccagcaggttacatgtgtacacctgcccaggagctatctggatttgcaaatgaaagacacacacacacacacacacacacacacacacacacacacatgccagttaattgatgatatgtcatgactagcttaaaggctgggcccacttaaaccttcatctgctaccccaggctcaattacttactcgaattcttacattattgattggctttctctcctgcagattttatgtcccattcttctccccctccaatcccaacctgagtcatggtgattctctccttcctttctcccagctcctagccctcaaaaggtcccacctcagtccatnnnnnnnnnnnnnnnnnnnnnnnnnnnnnnnnnnnnnnnnnnnnnnnnnnnnnnnnnnnnnnnnnnnnnnnnnnnnnnnnnnnnnnnnnnnnnnnnnnnnnnnnnnnnnnnnnnnnnnnnnnnnnnnnnnnnnnnnnnnnnnnnnnnnnnnnnnnnnnnnnnnnnnnnnnnnnnnnnnnnnnnnnnnnnnnnnnnnnnnnnnnnnnnnnnnnnnnnnnnnnnnnnnnnnnnnnnnnnnnnnnnnnnnnnnnnnnnnnnnnnnnnnnnnnnnnnnnnnnnnnnnnnnnnnnnnnnnnnnnnnnnnnnnnnnnnnnnnnnnnnnnnnnnnnnnnnnnnnnnnnnnnnnnnnnnnnnnnnnnnnnnnnnnnnnnnnnnnnnnnnnnnnnnnnnnnnnnnnnnnnnnnnnnnnnnnnnnnnnnnnnnnnnnnnnnnnnnnnnnnnnnnnnnnnnnnnnnnnnnnnnnnnnnnnnnnnnnnnnnnnnnnnnnnnnnnnnnnnnnnnnnnnnnnnnnnnnnnnnnnnnnnnnnnnnnnnnnnnnnnnnnnnnnnnnnnnnnnnnnnnnnnnnnnnnnnnnnnnnnnnnnnnnnnnnnnnnnnnnnnnnnnnnnnnnnnnnnnnnnnnnnnnnnnnnnnnnnnnnnnnnnnnnnnnnnnnnnnnnnnnnnnnnnnnnnnnnnnnnnnnnnnnnnnnnnnnnnnnnnnnnnnnnnnnnnnnnnnnnnnnnnnnnnnnnnnnnnnnnnnnnnnnnnnnnnnnnnnnnnnnnnnnnnnnnnnnnnnnnnnnnnnnnnnnnnnnnnnnnnnnnnnnnnnnnnnnnnnnnnnnnnnnnnnnnnnnnnnnnnnnnnnnnnnnnnnnnnnnnnnnnnnnnnnnnnnnnnnnnnnnnnnnnnnnnnnnnnnnnnnnnnnnnnnnnnnnnnnnnnnnnnnnnnnnnnnnnnnnnnnnnnnnnnnnnnnnnnnnnnnnnnnnnnnnnnnnnnnnnnnnnnnnnnnnnnnnnnnnnnnnnnnnnnnnnnnnnnnnnnnnnnnnnnnnnnnnnnnnnnnnnnnnnnnnnnnnnnnnnnnnnnnnnnnnnnnnnnnnnnnnnnnnnnnnnnnnnnnnnnnnnnnnnnnnnnnnnnnnnnnnnnnnnnnnnnnnnnnnnnnnnnnnnnnnnnnnnnnnnnnnnnnnnnnnnnnnnnnnnnnnnnnnnnnnnnnnnnnnnnnnnnnnnnnnnnnnnnnnnnnnnnnnnnnnnnnnnnnnnnnnnnnnnnnnnnnnnnnnnnnnnnnnnnnnnnnnnnnnnnnnnnnnnnnnnnnnnnnnnnnnnnnnnnnnnnnnnnnnnnnnnnnnnnnnnnnnnnnnnnnnnnnnnnnnnnnnnnnnnnnnnnnnnnnnnnnnnnnnnnnnnnnnnnnnnnnnnnnnnnnnnnnnnnnnnnnnnnnnnnnnnnnnnnnnnnnnnnnnnnnnnnnnnnnnnnnnnnnnnnnnnnnnnnnnnnnnnnnnnnnnnnnnnnnnnnnnnnnnnnnnnnnnnnnnnnnnnnnnnnnnnnnnnnnnnnnnnnnnnnnnnnnnnnnnnnnnnnnnnnnnnnnnnnnnnnnnnnnnnnnnnnnnnnnnnnnnnnnnnnnnnnnnnnnnnnnnnnnnnnnnnnnnnnnnnnnnnnnnnnnnnnnnnnnnnnnnnnnnnnnnnnnnnnnnnnnnnnnnnnnnnnnnnnnnnnnnnnnnnnnnnnnnnnnnnnnnnnnnnnnnnnnnnnnnnnnnnnnnnnnnnnnnnnnnnnnnnnnnnnnnnnnnnnnnnnnnnnnnnnnnnnnnnnnnnnnnnnnnnnnnnnnnnnnnnnnnnnnnnnnnnnnnnnnnnnnnnnnnnnnnnnnnnnnnnnnnnnnnnnnnnnnnnnnnnnnnnnnnnnnnnnnnnnnnnnnnnnnnnnnnnnnnnnnnnnnnnnnnnnnnnnnnnnnnnnnnnnnnnnnnnnnnnnnnnnnnnnnnnnnnnnnnnnnnnnnnnnnnnnnnnnnnnnnnnnnnnnnnnnnnnnnnnnnnnnnnnnnnnnnnnnnnnnnnnnnnnnnnnnnnnnnnnnnnnnnnnnnnnnnnnnnnnnnnnnnnnnnnnnnnnnnnnnnnnnnnnnnnnnnnnnnnnnnnnnnnnnnnnnnnnnnnnnnnnnnnnnnnnnnnnnnnnnnnnnnnnnnnnnnnnnnnnnnnnnnnnnnnnnnnnnnnnnnnnnnnnnnnnnnnnnnnnnnnnnnnnnnnnnnnnnnnnnnnnnnnnnnnnnnnnnnnnnnnnnnnnnnnnnnnnnnnnnnnnnnnnnnnnnnnnnnnnnnnnnnnnnnnnnnnnnnnnnnnnnnnnnnnnnnnnnnnnnnnnnnnnnnnnnnnnnnnnnnnnnnnnnnnnnnnnnnnnnnnnnnnnnnnnnnnnnnnnnnnnnnnnnnnnnnnnnnnnnnnnnnnnnnnnnnnnnnnnnnnnnnnnnnnnnnnnnnnnnnnnnnnnnnnnnnnnnnnnnnnnnnnnnnnnnnnnnnnnnnnnnnnnnnnnnnnnnnnnnnnnnnnnnnnnnnnnnnnnnnnnnnnnnnnnnnnnnnnnnnnnnnnnnnnnnnnnnnnnnnnnnnnnnnnnnnnnnnnnnnnnnnnnnnnnnnnnnnnnnnnnnnnnnnnnnnnnnnnnnnnnnnnnnnnnnnnnnnnnnnnnnnnnnnnnnnnnnnnnnnnnnnnnnnnnnnnnnnnnnnnnnnnnnnnnnnnnnnnnnnnnnnnnnnnnnnnnnnnnnnnnnnnnnnnnnnnnnnnnnnnnnnnnnnnnnnnnnnnnnnnnnnnnnnnnnnnnnnnnnnnnnnnnnnnnnnnnnnnnnnnnnnnnnnnnnnnnnnnnnnnnnnnnnnnnnnnnnnnnnnnnnnnnnnnnnnnnnnnnnnnnnnnnnnnnnnnnnnnnnnnnnnnnnnnnnnnnnnnnnnnnnnnnnnnnnnnnnnnnnnnnnnnnnnnnnnnnnnnnnnnnnnnnnnnnnnnnnnnnnnnnnnnnnnnnnnnnnnnnnnnnnnnnnnnnnnnnnnnnnnnnnnnnnnnnnnnnnnnnnnnnnnnnnnnnnnnnnnnnnnnnnnnnnnnnnnnnnnnnnnnnnnnnnnnnnnnnnnnnnnnnnnnnnnnnnnnnnnnnnnnnnnnnnnnnnnnnnnnnnnnnnnnnnnnnnnnnnnnnnnnnnnnnnnnnnnnnnnnnnnnnnnnnnnnnnnnnnnnnnnnnnnnnnnnnnnnnnnnnnnnnnnnnnnnnnnnnnnnnnnnnnnnnnnnnnnnnnnnnnnnnnnnnnnnnnnnnnnnnnnnnnnnnnnnnnnnnnnnnnnnnnnnnnnnnnnnnnnnnnnnnnnnnnnnnnnnnnnnnnnnnnnnnnnnnnnnnnnnnnnnnnnnnnnnnnnnnnnnnnnnnnnnnnnnnnnnnnnnnnnnnnnnnnnnnnnnnnnnnnnnnnnnnnnnnnnnnnnnnnnnnnnnnnnnnnnnnnnnnnnnnnnnnnnnnnnnnnnnnnnnnnnnnnnnnnnnnnnnnnnnnnnnnnnnnnnnnnnnnnnnnnnnnnnnnnnnnnnnnnnnnnnnnnnnnnnnnnnnnnnnnnnnnnnnnnnnnnnnnnnnnnnnnnnnnnnnnnnnnnnnnnnnnnnnnnnnnnnnnnnnnnnnnnnnnnnnnnnnnnnnnnnnnnnnnnnnnnnnnnnnnnnnnnnnnnnnnnnnnnnnnnnnnnnnnnnnnnnnnnnnnnnnnnnnnnnnnnnnnnnnnnnnnnnnnnnnnnnnnnnnnnnnnnnnnnnnnnnnnnnnnnnnnnnnnnnnnnnnnnnnnnnnnnnnnnnnnnnnnnnnnnnnnnnnnnnnnnnnnnnnnnnnnnnnnnnnnnnnnnnnnnnnnnnnnnnnnnnnnnnnnnnnnnnnnnnnnnnnnnnnnnnnnnnnnnnnnnnnnnnnnnnnnnnnnnnnnnnnnnnnnnnnnnnnnnnnnnnnnnnnnnnnnnnnnnnnnnnnnnnnnnnnnnnnnnnnnnnnnnnnnnnnnnnnnnnnnnnnnnnnnnnnnnnnnnnnnnnnnnnnnnnnnnnnnnnnnnnnnnnnnnnnnnnnnnnnnnnnnnnnnnnnnnnnnnnnnnnnnnnnnnnnnnnnnnnnnnnnnnnnnnnnnnnnnnnnnnnnnnnnnnnnnnnnnnnnnnnnnnnnnnnnnnnnnnnnnnnnnnnnnnnnnnnnnnnnnnnnnnnnnnnnnnnnnnnnnnnnnnnnnnnnnnnnnnnnnnnnnnnnnnnnnnnnnnnnnnnnnnnnnnnnnnnnnnnnnnnnnnnnnnnnnnnnnnnnnnnnnnnnnnnnnnnnnnnnnnnnnnnnnnnnnnnnnnnnnnnnnnnnnnnnnnnnnnnnnnnnnnnnnnnnnnnnnnnnnnnnnnnnnnnnnnnnnnnnnnnnnnnnnnnnnnnnnnnnnnnnnnnnnnnnnnnnnnnnnnnnnnnnnnnnnnnnnnnnnnnnnnnnnnnnnnnnnnnnnnnnnnnnnnnnnnnnnnnnnnnnnnnnnnnnnnnnnnnnnnnnnnnnnnnnnnnnnnnnnnnnnnnnnnnnnnnnnnnnnnnnnnnnnnnnnnnnnnnnnnnnnnnnnnnnnnnnnnnnnnnnnnnnnnnnnnnnnnnnnnnnnnnnnnnnnnnnnnnnnnnnnnnnnnnnnnnnnnnnnnnnnnnnnnnnnnnnnnnnnnnnnnnnnnnnnnnnnnnnnnnnnnnnnnnnnnnnnnnnnnnnnnnnnnnnnnnnnnnnnnnnnnnnnnnnnnnnnnnnnnnnnnnnnnnnnnnnnnnnnnnnnnnnnnnnnnnnnnnnnnnnnnnnnnnnnnnnnnnnnnnnnnnnnnnnnnnnnnnnnnnnnnnnnnnnnnnnnnnnnnnnnnnnnnnnnnnnnnnnnnnnnnnnnnnnnnnnnnnnnnnnnnnnnnnnnnnnnnnnnnnnnnnnnnnnnnnnnnnnnnnnnnnnnnnnnnnnnnnnnnnnnnnnnnnnnnnnnnnnnnnnnnnnnnnnnnnnnnnnnnnnnnnnnnnnnnnnnnnnnnnnnnnnnnnnnnnnnnnnnnnnnnnnnnnnnnnnnnnnnnnnnnnnnnnnnnnnnnnnnnnnnnnnnnnnnnnnnnnnnnnnnnnnnnnnnnnnnnnnnnnnnnnnnnnnnnnnnnnnnnnnnnnnnnnnnnnnnnnnnnnnnnnnnnnnnnnnnnnnnnnnnnnnnnnnnnnnnnnnnnnnnnnnnnnnnnnnnnnnnnnnnnnnnnnnnnnnnnnnnnnnnnnnnnnnnnnnnnnnnnnnnnnnnnnnnnnnnnnnnnnnnnnnnnnnnnnnnnnnnnnnnnnnnnnnnnnnnnnnnnnnnnnnnnnnnnnnnnnnnnnnnnnnnnnnnnnnnnnnnnnnnnnnnnnnnnnnnnnnnnnnnnnnnnnnnnnnnnnnnnnnnnnnnnnnnnnnnnnnnnnnnnnnnnnnnnnnnnnnnnnnnnnnnnnnnnnnnnnnnnnnnnnnnnnnnnnnnnnnnnnnnnnnnnnnnnnnnnnnnnnnnnnnnnnnnnnnnnnnnnnnnnnnnnnnnnnnnnnnnnnnnnnnnnnnnnnnnnnnnnnnnnnnnnnnnnnnnnnnnnnnnnnnnnnnnnnnnnnnnnnnnnnnnnnnnnnnnnnnnnnnnnnnnnnnnnnnnnnnnnnnnnnnnnnnnnnnnnnnnnnnnnnnnnnnnnnnnnnnnnnnnnnnnnnnnnnnnnnnnnnnnnnnnnnnnnnnnnnnnnnnnnnnnnnnnnnnnnnnnnnnnnnnnnnnnnnnnnnnnnnnnnnnnnnnnnnnnnnnnnnnnnnnnnnnnnnnnnnnnnnnnnnnnnnnnnnnnnnnnnnnnnnnnnnnnnnnnnnnnnnnnnnnnnnnnnnnnnnnnnnnnnnnnnnnnnnnnnnnnnnnnnnnnnnnnnnnnnnnnnnnnnnnnnnnnnnnnnnnnnnnnnnnnnnnnnnnnnnnnnnnnnnnnnnnnnnnnnnnnnnnnnnnnnnnnnnnnnnnnnnnnnnnnnnnnnnnnnnnnnnnnnnnnnnnnnnnnnnnnnnnnnnnnnnnnnnnnnnnnnnnnnnnnnnnnnnnnnnnnnnnnnnnnnnnnnnnnnnnnnnnnnnnnnnnnnnnnnnnnnnnnnnnnnnnnnnnnnnnnnnnnnnnnnnnnnnnnnnnnnnnnnnnnnnnnnnnnnnnnnnnnnnnnnnnnnnnnnnnnnnnnnnnnnnnnnnnnnnnnnnnnnnnnnnnnnnnnnnnnnnnnnnnnnnnnnnnnnnnnnnnnnnnnnnnnnnnnnnnnnnnnnnnnnnnnnnnnnnnnnnnnnnnnnnnnnnnnnnnnnnnnnnnnnnnnnnnnnnnnnnnnnnnnnnnnnnnnnnnnnnnnnnnnnnnnnnnnnnnnnnnnnnnnnnnnnnnnnnnnnnnnnnnnnnnnnnnnnnnnnnnnnnnnnnnnnnnnnnnnnnnnnnnnnnnnnnnnnnnnnnnnnnnnnnnnnnnnnnnnnnnnnnnnnnnnnnnnnnnnnnnnnnnnnnnnnnnnnnnnnnnnnnnnnnnnnnnnnnnnnnnnnnnnnnnnnnnnnnnnnnnnnnnnnnnnnnnnnnnnnnnnnnnnnnnnnnnnnnnnnnnnnnnnnnnnnnnnnnnnnnnnnnnnnnnnnnnnnnnnnnnnnnnnnnnnnnnnnnnnnnnnnnnnnnnnnnnnnnnnnnnnnnnnnnnnnnnnnnnnnnnnnnnnnnnnnnnnnnnnnnnnnnnnnnnnnnnnnnnnnnnnnnnnnnnnnnnnnnnnnnnnnnnnnnnnnnnnnnnnnnnnnnnnnnnnnnnnnnnnnnnnnnnnnnnnnnnnnnnnnnnnnnnnnnnnnnnnnnnnnnnnnnnnnnnnnnnnnnnnnnnnnnnnnnnnnnnnnnnnnnnnnnnnnnnnnnnnnnnnnnnnnnnnnnnnnnnnnnnnnnnnnnnnnnnnnnnnnnnnnnnnnnnnnnnnnnnnnnnnnnnnnnnnnnnnnnnnnnnnnnnnnnnnnnnnnnnnnnnnnnnnnnnnnnnnnnnnnnnnnnnnnnnnnnnnnnnnnnnnnnnnnnnnnnnnnnnnnnnnnnnnnnnnnnnnnnnnnnnnnnnnnnnnnnnnnnnnnnnnnnnnnnnnnnnnnnnnnnnnnnnnnnnnnnnnnnnnnnnnnnnnnnnnnnnnnnnnnnnnnnnnnnnnnnnnnnnnnnnnnnnnnnnnnnnnnnnnnnnnnnnnnnnnnnnnnnnnnnnnnnnnnnnnnnnnnnnnnnnnnnnnnnnnnnnnnnnnnnnnnnnnnnnnnnnnnnnnnnnnnnnnnnnnnnnnnnnnnnnnnnnnnnnnnnnnnnnnnnnnnnnnnnnnnnnnnnnnnnnnnnnnnnnnnnnnnnnnnnnnnnnnnnnnnnnnnnnnnnnnnnnnnnnnnnnnnnnnnnnnnnnnnnnnnnnnnnnnnnnnnnnnnnnnnnnnnnnnnnnnnnnnnnnnnnnnnnnnnnnnnnnnnnnnnnnnnnnnnnnnnnnnnnnnnnnnnnnnnnnnnnnnnnnnnnnnnnnnnnnnnnnnnnnnnnnnnnnnnnnnnnnnnnnnnnnnnnnnnnnnnnnnnnnnnnnnnnnnnnnnnnnnnnnnnnnnnnnnnnnnnnnnnnnnnnnnnnnnnnnnnnnnnnnnnnnnnnnnnnnnnnnnnnnnnnnnnnnnnnnnnnnnnnnnnnnnnnnnnnnnnnnnnnnnnnnnnnnnnnnnnnnnnnnnnnnnnnnnnnnnnnnnnnnnnnnnnnnnnnnnnnnnnnnnnnnnnnnnnnnnnnnnnnnnnnnnnnnnnnnnnnnnnnnnnnnnnnnnnnnnnnnnnnnnnnnnnnnnnnnnnnnnnnnnnnnnnnnnnnnnnnnnnnnnnnnnnnnnnnnnnnnnnnnnnnnnnnnnnnnnnnnnnnnnnnnnnnnnnnnnnnnnnnnnnnnnnnnnnnnnnnnnnnnnnnnnnnnnnnnnnnnnnnnnnnnnnnnnnnnnnnnnnnnnnnnnnnnnnnnnnnnnnnnnnnnnnnnnnnnnnnnnnnnnnnnnnnnnnnnnnnnnnnnnnnnnnnnnnnnnnnnnnnnnnnnnnnnnnnnnnnnnnnnnnnnnnnnnnnnnnnnnnnnnnnnnnnnnnnnnnnnnnnnnnnnnnnnnnnnnnnnnnnnnnnnnnnnnnnnnnnnnnnnnnnnnnnnnnnnnnnnnnnnnnnnnnnnnnnnnnnnnnnnnnnnnnnnnnnnnnnnnnnnnnnnnnnnnnnnnnnnnnnnnnnnnnnnnnnnnnnnnnnnnnnnnnnnnnnnnnnnnnnnnnnnnnnnnnnnnnnnnnnnnnnnnnnnnnnnnnnnnnnnnnnnnnnnnnnnnnnnnnnnnnnnnnnnnnnnnnnnnnnnnnnnnnnnnnnnnnnnnnnnnnnnnnnnnnnnnnnnnnnnnnnnnnnnnnnnnnnnnnnnnnnnnnnnnnnnnnnnnnnnnnnnnnnnnnnnnnnnnnnnnnnnnnnnnnnnnnnnnnnnnnnnnnnnnnnnnnnnnnnnnnnnnnnnnnnnnnnnnnnnnnnnnnnnnnnnnnnnnnnnnnnnnnnnnnnnnnnnnnnnnnnnnnnnnnnnnnnnnnnnnnnnnnnnnnnnnnnnnnnnnnnnnnnnnnnnnnnnnnnnnnnnnnnnnnnnnnnnnnnnnnnnnnnnnnnnnnnnnnnnnnnnnnnnnnnnnnnnnnnnnnnnnnnnnnnnnnnnnnnnnnnnnnnnnnnnnnnnnnnnnnnnnnnnnnnnnnnnnnnnnnnnnnnnnnnnnnnnnnnnnnnnnnnnnnnnnnnnnnnnnnnnnnnnnnnnnnnnnnnnnnnnnnnnnnnnnnnnnnnnnnnnnnnnnnnnnnnnnnnnnnnnnnnnnnnnnnnnnnnnnnnnnnnnnnnnnnnnnnnnnnnnnnnnnnnnnnnnnnnnnnnnnnnnnnnnnnnnnnnnnnnnnnnnnnnnnnnnnnnnnnnnnnnnnnnnnnnnnnnnnnnnnnnnnnnnnnnnnnnnnnnnnnnnnnnnnnnnnnnnnnnnnnnnnnnnnnnnnnnnnnnnnnnnnnnnnnnnnnnnnnnnnnnnnnnnnnnnnnnnnnnnnnnnnnnnnnnnnnnnnnnnnnnnnnnnnnnnnnnnnnnnnnnnnnnnnnnnnnnnnnnnnnnnnnnnnnnnnnnnnnnnnnnnnnnnnnnnnnnnnnnnnnnnnnnnnnnnnnnnnnnnnnnnnnnnnnnnnnnnnnnnnnnnnnnnnnnnnnnnnnnnnnnnnnnnnnnnnnnnnnnnnnnnnnnnnnnnnnnnnnnnnnnnnnnnnnnnnnnnnnnnnnnnnnnnnnnnnnnnnnnnnnnnnnnnnnnnnnnnnnnnnnnnnnnnnnnnnnnnnnnnnnnnnnnnnnnnnnnnnnnnnnnnnnnnnnnnnnnnnnnnnnnnnnnnnnnnnnnnnnnnnnnnnnnnnnnnnnnnnnnnnnnnnnnnnnnnnnnnnnnnnnnnnnnnnnnnnnnnnnnnnnnnnnnnnnnnnnnnnnnnnnnnnnnnnnnnnnnnnnnnnnnnnnnnnnnnnnnnnnnnnnnnnnnnnnnnnnnnnnnnnnnnnnnnnnnnnnnnnnnnnnnnnnnnnnnnnnnnnnnnnnnnnnnnnnnnnnnnnaatgggatagatctgtaaggatactgtaaggatcaggctgtcttgttcttgccaaggagaaatcaacccttgccgacatggcaaagaagaaaccaaaagggtgtatgccccagcctccaactggcctctaagcttttgcttactctcttggttagaaaataccctatagaacccagaagatatgggaacctacattgcaattaatatggtcatttgactaaactgctttggctcccagcaggttacatgtgtacacctgcccaggagctatctggatttgcaaatgaaagacacacacacacacacacacacacacacacacacacacacacacatgccagttaattgatgatatgtcatgactagcttaaaggctgggcccacttaaaccttcatctgctaccccaggctcaattacttactcgaattcttacattattgattggctttctctcctgcagattttatgtcccattcttctccccctccaatcccaacctgagtcatggtgattctctccttcctttctcccagctcctagccctcaaaaggtcccacctcagtccattggcccagccattaactattggttctttattggtttatcaaaagccaactggagacaaggaccttcagcatttggaaacatttattcctgatattggggccagattagttcatagcattggaaacaatctccaacatggttacctcctgtggcacagagcagaggatggaaagtagaacaagggaagtgtggggacaaaaaggtatagaactcaagtgccctcttatgatgttaccaatatggggcaggaaaaggaaaatctcattaactgtgagcctacctgaaattccagtagaattatattcctgtgatctcctggggatgcctgataaccaacagaggtgaggtggggggcgggagggtatgaactatctagtcttcgttgctttaccctgatcttcacaccagctcaaagacaagagctggctatttgagcgagagtcccttttccacaattgaatcttgacaatttattaaaatgactctttttggataatgagctggatgaggccaaccctgaccgagcctctggaggctgtgctatgctggctgctgtctaaaaccagcccactggcttgtttgtttgcataccggaaaatgtattggccacttgattctgttataaattaccagcctggaaataaatatcatagctgggtccacagtaagtaacagatgccggaggagtgcagagtgagataaatgtgttttggatgcaaacctccttccgattgttcacagacagatggaggcaggcccagtgctggtttgcagtcgctctgtgtgctgtgtaggtgggacttaaatgaactgaaagttcttttaaggttaggaagttttctgcactcgttcttggcaaatccccagaggagacccatttgagcaatacatttccttttatctccttggctgaggaatctcgtggtttgaatttttcccctctggggactttgtgggtttctggagtccagagaaagtcgttttgcttagatgcagcatgaggaccggcacgtggcacacatgctttcagtggggtttagcagggttggcagccaggacaaacttttcagtgcttgagagcatagcctggagcaagtcaggttgagccctgccctgtactgttgaacaaccctaagatgggaggagacagacaagggtgtaaatgaataagccatctggtgattcatgttttgaagaaaagaaagccaagcaggctagagagatggttccgctggttaagtgcttgccatgagatccttaggttaatccctagcattcacagaaaaggccatgcatgcttggcaacactgctaataatcccagcaccaggggcgggggcgggagcggaggaatagagatggacggttccatggagattcctgggccaaccaagtgagccatctccaggttcactgagaagagtgattgataaaaacctctgacatcaacctctggcctatgcacattttcacgcatgtctgcatgtgcctccacacacttgtacacacatacaaacacatgcatacacaaacaggaagcatgaaaagcaaactgggagtaggggaaagaagcagagatcagataagtgctgtctcagacagtgaatggaagtaaagccaaagcccaagcccaagaattagagagaaacactttattacatgggaacaggcaaagtggccaggtgctaagtcttctagtcaaatgtccctactgcttctgaagaggagctatacgtcaggttaggcagactgctaaaggctcaaagtgggaattcaggaatgtcaaaaggccaaaactggaagttaactaaaccatcaccacctcagggaacagctttctgacttcatggctgagtcagttcccatgggtactctccagagccccacaccttccctcggaagttcacatcccagtttgtaggtgtctgtgagctgctccaaaggagggctcatgtctgtctggttcacttgcgcttccagcactgtgtctagtagaaagtgttcctgtgatgcttgctggttgaatctgaaatgagtatgcaaacaaacaaaagcaaaagtagcgagcctcagcagctcaacctcacaattgatgtgtgaatttcttgcccattttttttttttaccattaaccttcaagtatatttgattctttcaaatgttagtctcctccaaggcctttgccaatgcaaaagcagacttaggcatgcattcgactgaccaacctttgcagaaagctgcacccagctctgagtggcatgtctcatgactgaggagaagacgaatgcaaaaactcttagttctgctcatatccctgtatttgctggtcatatatgaagtccagtggagtctctcatgagaaaggagcatcatgatgaaggagttccctctgtatcacagaagaggtcatgtctgaagtcctgggtagtgaggctagaacacaggatgtgtgcattgagagaataaatacagagagacagacggaaaaaaaattcaagatgaggatgagatgtgtggttggtgtaatgtggagcaataaaaaattattgtgcaagcagagtagagtcagtatagactcaaagacccaacacccttgggtgtatactgagaagtccactattgctgaaagcagatgagattcaaaaataaaaaaaaaatgggttcttggagaacatggaaagttgatgctatggcccagatagggggattgaaggactgtgagaacacctgataacatagcttacagaagagtgtagacataagaaacctcatcattttctctttccaaacctactcaaagtgttcagaatctaattcttctatctagccatcatagccctgtccatcttgacttggagtaacagatataccttcccattgctttgttcttgggagaggactcagtttctcctaacaaggtaggactcatctgccaagagatctctaaacgttcaatatgcattgttaatcatcaaagaggtctcaataaatgtttgccaaatgagaaatacaattataaaatcaaaaacacaatgtgaaatcttagaattgtatccaatacgtattataggaactgttgcatattaactttttaaatattttaatatactttaaatcgtctgatagcctttttataacaatatctgagacccaaagaaattaattaagttaacctaaatgacccagccttgggacagagcccaaaattcaaatctaggcaactgagttgctctatggtacatataacccacactctgtgtctttctggttagtttgtcatagcttgcttatttgctatttgctctgtgtctgtataagctcctggagaatagtttctatttctatagaagtcaggtgtgtcaactgagtgtcctcattaagtatgggattccttgcagtaatcgtggtgcatggttaatcttactatgttgggctttctcattgctgtaactaagtatctgagtaaggcaatttaagtgaggaagtatgtattttggcttacagtttcagaggtgtcaatcagtctgtcttaacaagagggtgtggcagaatacaacagttcacatcacagccaggaagcagagagagtacgttataggaacagaacaggatagaacaagatggagtccccaagatctaggcctggcctcctacttcccccttctccaaataacatgattacattataaatctatcagaagtcactccattccttggtccagagtcttcatgatctactgagacagacttacttgggggaggggtttcattgatcctctaagcatttctccatccagtcaagttgacagtgaagattaactattgtatagagaatttatggtcataatgttggtcttgggacagtggtggtaggtactccagataaagtatgaagagaaattgggagaaactttccaaatatttaccaaatggatgaaatagtaagaccttcaaatgtgcaagggacccatacactaattttggaatcatcacttggatccagcgcttcagagctaccaccaaaaactctagggcaattctggtttacttcttatggaagactggagatacctcagcttctctaatgtaattttacaatgtttaaactgaagcagctattcaccaaactttagggcttacaatgttcagggacagttaaccctaagtgtgaagtatgtttcaagactgtcaacaattcattctatctaagactgtcccataaagtgcctgccatacggtcattggggttgagttcagacccctagcattcatgtaaaacctgggcgattagtgaccatctataagcctagcactggggcaggggaagaaagttgatagaagatgccttaagctcactggacagagaactgaatcctgaaatccaggttcagtcagagactctgtctccaaaaattaggctggagagctattaaggaagtcacccattccttttaccttaatacgcatgtacacatatattcacaattcattcaaatatgtacacacatatacatacatacacatgacataagcaataaaatttaactgtgtccctatccacccatccatctagtcactaaatgctaatcatgtttagtgatcaatactaaacttaagcttttcttcaatataacacactagagacactgttcctctataacaaaggaggtccttccctccatttcactcccaaagaaaagacagtgacatctacaacctcttctctcgtgattaggatgttattaaccagcaagttagctccatgccagagcacagtagggcttaggggagcactctgaaatagctagggaaatcagaaaccagtcttcagattagttcttggctaactgagctcacatgttcacatggtcctctctgtacccagaacttttctatcaccagagagaagcaatgtgaaagccttcctatttcctttctctgattgttaacactgtacagtcagaaaaaaaaaaaaaaaaaaaaaaaaaaacaaactggccttttcagtttcctactccaggtgccctggtaggcctagcattgggatctgtatatgattgtggctcaaaaaagacttggtggtggttgctgtgcaccataaacctggaacaccttctcccctgtatttttgggttgcatacacataaggaatgcctatggcaaacctgtatgggcccctcataggtcatcacaataacagccaatgttgtctccatgctctacacacagtcttatatggtctttaatactcctctgaagatgctatcttcattttgcctatgagaatgccaggtatttaggaagaaatgagtattaatgttgtgttgttttcaatggaaacccttcactgtgtgtgtgtgtttttttttcctattatccaggggtaccaccgaccccggcactacattgcaacccaaggtaagtgtcttggagtgactcttgagtcactcttgataccctcaggaatatcaaggaagagggatttaaaaataaaatcaaagtaagcctttttatccactcgttctctctctgttttcaccaaagtctttctacactagtggcctggcttctcctgaaggaaggggggggagattttgcagatagagaagccagtgagacaggggcaacttggcctccagaagttcttgaggagcaaggtcatgacaagtccagcttagaatagcagcagaaagagctgtcactatattagtaagagacaagataccatgcatgggtgaccagaagataaaagtctcaataaatcaccgaaagaggtccccatccatcttgcgaatgcttgtctacaaaagagatacagccagttgccctagaacacagtgtggcagtatgctatcagaaggcttaaaattgacgatgccttttaaagcctccatgggagaagctctgcagataattacacgtgtggaccttgacatatataaaaagctttcttcacaatgttatcgtgtcatctgtaataggaaaaagtgggaaaatcttaaatgcccaataataaataggttggttaaataacataccgtgtctctatgttgtagtaaactctgtaactatgaaaaaatgccatttttgaggacatgaaaaaatacttatgatagacctggtacttattgcagcaaatacatttgtacacacaaaacacggaaaaaaaatactattcaaattttctttcaaatgcataaattgcttttgtaattttaaaaatgatgaagacctagaatcttaagagtcattttctaggaaattgctttagactgtcagatcctatcttccactctttgcttttcagtcctttcccttttttctttctcttttgttttctatgttttaatccttcctttcctggtcaagcttcagatgaatgtctctagcatttgtcaaactcaaaacgctgccccctcttgcttttggcagctccaccctccctaccctagctcccttgctagctctccttgagatcttgctgtcccttgaacacaatctacactatagtccagataaagtgctgaatcgggaaaaagtgaaactgctaggttgaacatgagggtgaggatgaggatggagaggatgctgcagacaacgagcatctaaaaatggggcttttcttatctctgctgtgttctggcccccaaagactcatctccagcctctgtctcagcaacttggtattccactagggctcctctacactcgttcttgcccacctctatagaaccttgattaaacagccaagagagttaacctttgagcagccgctttgtatctgcagtctctaaccctgtccccctttctgtcaccaggtccaatgcaagagacggtgaaggacttttggagaatgatctggcaggaaaactctgccagcatcgtcatggtcacaaaccttgtggaagtgggcagggtaagcctccccttcagtcatgtggacagagggtggtggagacaaatgttggggcacttttgcagtgtgccaccagcttccaaagcatcagcacacccttacagcagcctacagggatgggggatgccattcctcttacttcacatctgagcagcatccattccttcagctctcccatcccatctctatcctctctccgttgacaatgtcacctcatagattttgaggaaatgaaagctatcagatgtgtactctcttcccaacccgttacagacctacaatcttatttgtatcagcatccatcttcatatccttcctttctattatcaggtctagccaagagaaagggttgttttggttgacacccctaaaggctgaatactggccatttcttaggacaaagcccaatatgacaaacactaagtacctgccttttgataggccacccctgggaaggtgctttctgagaagtcactgcaagcctttgtttacctaccgtcctcatccgttagcccaacattctttatccattaaagaacctagtcttgcctaaaagaagagaatgagcttgcactaacaaagacaccagatggacggggcagggaagcaaccagaagttcctgagaagcaagtgacatgttcagctcttaagggaggtggaagggacctgtaactaagatgtgtcattgaagggaaggagccaggcaggacagatcaaacgtatcaatatcaccatgtgcaacccaccaaggctcagagattttcacatattcccttttcccttgaaaaataatactgttcctcactgctgaattatttccttcagtgtatgaatatgctcaaaaggacaaaaaccacagcacatgagtcacaaaacagaaacaaaaatcatcaaactgacaacaggatgccaggggttgggagggcagattgatggagaggaggagaagaagggagaggaagagagtaatctgaataaattatatttattatgaaattgtcagaaaaaaacaacccacaaaaatgataagactataaaataagttaaaaccttttgaaagccaaacaaaggtgcctgccctgttcccacttttctgctgaaactcaaggacttacatgatgctctgtgtctccactgggttctcctccacccacctcaacatagcaggtctctctcttcccccagccatgatgttgccaacatggctccctccctattgacaaacctggcctccacatccctctctccatctgtcttctcctctcaacagcctgttcttcctcccctgcctatgaaccttcactgttcttgagggttcaggcctctgtctccttctgttctatctagattcagtcctaagttgtccttagcaagagcttgggaaagaggctactatttccaattttgcttttgttcctttgattaactgtggcccgtgggtcagtgggcaggctgcacagttgaaaggttgatgtacaaatatctagactcaaagggctcccatagtgtatataaactatatcacgagtggacaggtaagttatgggtagtctattaggataaagtgtgctggtcgcagtggtggggcagaagaagctctccattctgtcatactgtattgaaagagtgtagatatctcatgggtcagggctaaatgagtcagtatccttgaacattcaccatctgaccaattgtccagttttacagataaagcacagatggaaaagggtggatacttgaaccaatcattatagtcctactcttgactcttattttaatacttgaaaccctgctgatcagactgtcccccactattcagacttcccccactattcagactgtcccccactgttcagactgtcccctactgttcagactgtcccccactgttcagactgtcccccactattcagactgtctcccactattcagactgtcccccactgttcagactgtcccccactattcagactgtcccccactgttcagactgtcccccactattcagactgtcccccactgttcagactgtctaccactattcagactgtcccccactattcagactgtcccccactattcagactgtcccccactgttcagactgtcccccactgttcagactgtcccccactgtttagactgtcccccacttttcagactgtcccccactattcagactgtcccccactattcagactgtctaccactattcagactgtcccctctgttcagactgtctcccactattcagactgtcccccactgttcagactgtctcccactattcagactgtcccccactattcagactgtcccccactgttcagactgtctcccactattcagactgtcccccactattcagactgtcccccactgttcagactgtcccccactgttcagactgtctcccactattcagactgtcccccactattcagactgtctaccactattcagactgtcccctctgttcagactgtctcccactattcagactgtcccccactgttcagactgtctcccactattcagactgtcccccactattcagactgtctaccactattcagactgtctaccactattcagactgtctaccactattcagactgtctaccactattcagactgtcccctctgttcagactgtcccccactgttcagactgtctcccactattcagactgtcccccacttccagctgctccaactgttcagctgcttccccaaggaataagcctcaggctgcaactctagtgaagaacagcagctgcccagaatttgagcattccagtctggcacacagcacattccacattctgaaatgaattctcctgatgctggactgtgaatggaaaccaggcaacttgggagaaagagcagtttcataatggaactccttctagtggccaacacacacacacacacacacacacacacacacacacacacacacacaccattatatttatggctcagtaatcacacaaggcagtgttcctggttatgagtcagacagtctgggtgtgttcctcactccattcctcgccagctgttgactgtgaacaattttctcggcttccccatgtttaaatcctcacctgtagaatgtggggcaacatattnnnnnnnnnnnnnnnnnnnntgtccccccaactgttcagactgtcccccactgtttagactgtcccccacttttcagactgtcccccactattcagactgtcccccactattcagactgtctaccactattcagactgtcccctctgttcagactgtctcccactattcagactgtcccccactgttcagactgtctcccactattcagactgtcccccactattcagactgtcccccactgttcagactgtctcccactattcagactgtcccccactattcagactgtcccccactgttcagactgtcccccactgttcagactgtctcccactattcagactgtcccccactattcagactgtctaccactattcagactgtcccctctgttcagactgtctcccactattcagactgtcccccactgttcagactgtctcccactattcagactgtcccccactattcagactgtctaccactattcagactgtctaccactattcagactgtctaccactattcagactgtctaccactattcagactgtcccctctgttcagactgtcccccactgttcagactgtctcccactattcagactgtcccccacttccagctgctccaactgttcagctgcttccccaaggaataagcctcaggctgcaactctagtgaagaacagcagctgcccagaatttgagcattccagtctggcacacagcacattccacattctgaaatgaattctcctgatgctggactgtgaatggaaaccaggcaacttgggagaaagagcagtttcataatggaactccttctagtggccaacacacacacacacacacacacacacacacacacacacacacacacaccattatatttatggctcagtaatcacacaaggcagtgttcctggttatgagtcagacagtctgggtgtgttcctcactccattcctcgccagctgttgactgtgaacaattttctcggcttccccatgtttaaatcctcacctgtagaatgtggggcaacatattttctaaggttgtggtgacatataattaacaccatatacgaaaataagccatggaacatttaataggcaatgctagacaaggtaagtatgagctctcattagctgtaggagtctgaggctctttctagaaggtacttagctccaaggtctcagatcccagcaatgtccatttgcctccaaagcctgttgtgtactgagtgttcccctaagtgggttcccagggatgctagcctacaggatgaggagtgagcagagggttccatggttaaatacgcttgggaaatgctgtgtcctctgcccggttgaagagtcctaagatacttattaacaacattagtacttttgaagaactaagtcatcttttaccaaagcagcttgtttatctttgttgaaacaagcatttcccaaactcatttgaccacaaaaaaacctctttttgttttgttttgttccttgttttgttttgttttattttattttcatttttgtttacctaacacctattagcacccagcggaacacactgtgggaactgccacgctaggccgtgctgcatcccccggaatggtaataatgcttttgttattttaagggggaaactatgatttctttttctctctgtggaacttagagccaaacatgggactggcttgctgttagcatagacacctaccgctggggcagagagtagtggtatatcttccctttgagctcaggattgtctgtgtcttccccaactaagaacctttctccttccagcccccagggaccctctcctaatcgcttctgcttctccctccttgctgttccccacctgatttctcaacctcactcagatgataatgcttagcggctccacgctgacacagcaggaaatgaacaagtcaccagtctccagtattattattcatctgctaagtggagatgatgaacctcccatcttacctagttctttctgacggcttagtgtagcaaggcagcaggaaaccacaaggagctgtaagagaagatagtgctgttgttataatggccccaatgactctggcagtgagttaggccctgcacaatttgctgatccctgaccactgagtgccccatgggctgaaatgggcctccaaagtcacccttgggtttattcggataggaaagccaaaggaggtggcttctcaccctcctccctatcctctccctgtctatcactcggccacaggtgaagtgtgtccgatactggccagatgacacagaggtctatggagacattaaagtcaccctaatagaaacagagcccctggcagaatacgtcatccgcaccttcacagtccagaaggtaagtttccctttccacggaagtccctctttgaagccaattggttggtctattcattcagagagtgtagagcaaacgtctgatttgtgcccagctggcacgatacaacagtcagaatagactttgcaaccattcctcaaccagagagatgaacagacttcaacagacaatgtaatagactaaggatgtgatacattctgatgaaagctatatggtaccaaaggatagaggccaaaatgaacaggggcacaagagatttaaatgtaccccattgcagacccccagatccaaagtaatttgtagagaaaattgggactgagaaggctccggtagaggaagggatgagaggaatggtatccttggccaagggtcaaaaacatgtagtgtggagggcaaaacgatgtcagcatttcccaggctgggagtctggtcaaggattgatctcaatcaggggtgatttggtcctctggttggtgtttgtctgatttctcctcctctgcagttacattagataattcctttctatactttaatatagtggttttcaacctgggtaatgccatcagaaatatcagatatttacattaagacttctaacagtagcaaaattatggttatgaagtagtaatgaaaatagccttatggttgagggtcaccccaacatgaggaactattttagagttgcagcatgaggaatcttgagaacctctgccctagtagaactatccgtgtagaagtcttccttactcagtgaggtcatgagcgaatccaggagcaggaactatggcttaaatcaccgcttcaaagggcctagcacacgtccagggaaagatgacccttggtaagcaattacctaacttgagataaaaaataataataataataataataataataataataataataataaaatagatgtttcctagctccagctaggaaatgccatgaatgtctgctgaagacatgcaagcaaaatactcagacacgtaaaaataaataaatacattcattcatttttaagatgtttttcaagcaactactggtttcacgttttccaaaagcaactgggccgagtttccatgagttaacacccattcacacagcaagggcctcacccttccccgccaccccacgtcacactgggagagtaatgaaggaagcaggtggagaaacagaggcccattctctcctcagaaaggctaccatgagatccgggagctccgcctcttccacttcaccagctggcctgaccacggtgttccctgctatgccactggccttctgggctttgtccgccaggtcaagtttctcaatcccccagaagctgggcccatagtggtccattgcaggtgagtcaaacctccatccctattcttcaatcaacgggacctctagggatctgctctctgggtgagggtgatactatcctgtcccagggccttggttttatggctttaagactcctcctcctatgccctcccccgccccctcgagccttgccaccttctgaaaagacctgtccaacaacaatggcagtaatggttaagttactgttaaggttgttactccaagggacacaatggggcttagcagcagctgctatgcctaccacgtatattatttcacttcgcatccaagcttgataggtgagcaatattcttatcactcccactttacagatagggaaactgaggcacagaactagtagagagagctgggaaatgtcaaagctggtattgttaacatgttctctggagcttcctggcagcaacttgacatgggacaccttggtataagaatgtgtctctttactcctattatttgtaatatcagttgcaggcctgcagggtctttaatagagagcgagtagccagcatcaggttccccttattactgagatggggaacttttagctttgacctagaaagtcactttgaacataagtggcattggattcttctaaatggagatgaagtattgtgtcaagggcatttggaattggaagaaggtagatgcccagagctgaaggccacagagtccccctccttcccaatgcccctcagtttcagtatgaccttgggctcagcatgtctccttacaccttgtatgactcggccatttcatacttcctggcaatacctgtgtcagtccagaggccaggggagactctgcgaatgtctcagagccagctcctcccacacatggcatccctttgtgttctccacggcagcagatacagaaccaaccacacttcacagggaaaacctgagggtttcgccaaagcctctgcactgtgaacatctggcatggattctctgctttgtctttctctcattgcgaagagcaaaaggtccgttagcatctaagcttgctatctatctcctaaagacagccagagatcaggaggtagagaggaagtggaacaatggcaagtagtcatgagaccctctgccacttgtggtcctgagtgtggtctgcgcttgcatctccctagcaattcactgtaaagtgtcggagcagagtgataccttctcctggggatgctacggtttggctgatgcacactaagtgcctgaaaggattccaaaccactctcccagactcttaccattacccaacaccccagacaatgcgtaacaaatactttaggacagtaagtgtcttttactaatcttcctttccctactcttaactgtggtatccaggacatcaaggatgcttgataaatatccgtggagtataagtagccaggcacaaaactaagcaatttacatgcattatgcctctaaaatgcaatctaatgcaatttacatatgttgtaccattaatactaagaggtctatggcctgtttcattttatggatgagaatagtgaaacccaaagagatgaagtcatttgtccaaggtcacacagctagtaagtaacagagccaagatttaatctcaggatctcaaataccatgtgtttaactactagtttattctagaaaaacaaaacaagatgcatgcacacactcatgcacgctcacacacacacacacacacacacacacacacacacagctcagacttttcaaaacctctctcagagggcaggagctgaagttcactgacaccaggcaccttattcaatgatgttggaggcaagattcaaatccagtgataccagttcattcccatgagataagtggggggtgaggctttgggaaacatgaatgaatgactatctatctatctatctatctatctatctatctatctctatctacatctacgtgtacttcacatctacatctatctatctgtatgtttatctagatagattagattggatatagagagagaaggggaagggaggaggagggaaagagagagagagagagagagagagagagagagagagagattccttcccaagctccagagccagttctgttcaattcttttggaaggggtcttgagttgcgtggggacaggtatttggaggcaagattaagtcagactacactcggtttgaatgatggcagcttgtcacagatgaggactgcttccaacgggtttggtttccagaccaccattgatgtgggccccggttggccattgcttcatggccagtgttgctttagtatgtcattgatttgtttccacggggcaagtaaagtgtgaaagcaccatcaatgtgggcttactttacagtctctcctgcattcccttccaaaactgtgcacagtacaggccagcgttctgtgattctgccctattgttttatatcccagagataatctgggaagatctgtcctgttccagggagttttgtgaaatcctcttgctattctgtgtcttgtctgagattcccctgttaaagcttgtcagtaatgacaaactgattctctgcccaggaacctggtgtttgatgaggatctcaaggctgtcagctgctccagtttgatggtgtgcttgactcatgaccccgaagaagccatcataaatgggtcaactgcagggccttgaataggagactccagatctactctctgcctttagacacagctcagagctctctggtctctgtctatcccactctctgtaacctaattaaaaaatgaaagggagaaggagaaagacatgtttactaggaaggctccagtatgccaggcacactacacatcttattaagaaaggtagtagaagctctacactgtctcagagaactctcagctctcccatttgccagttccatgacttcaggctacaagttctctatgcctcagtgtctcgacaatgaaatgggataagaaacttgactatcacctcctatcaaatttgtatagcaatgtattgtacaaaaagtactccataagcatttgctatacatatacaacaaaataaatccttgaaaccacctccaatggtaagcattgctttccaatctaatataagaaaatttagtcacttgttcagcatagcttagcaatgttagggtcccaaccattccatctgacttctgtaaccccctgcctttcagcaaggcttttgagataaggtcaaatggtaggggccttatcaccataatccatcccatcccaagatccctaacacacacctaacttctcttccagtgctggagccgggaggactggctgcttcattgcgattgacaccatgctcgacatggctgagaatgaaggggttgtggacatcttcaactgtgtgcgtgagctccgggcacagagggtcaacctggtgcagacagaggttagtcctggggtagtaagccagctagttaccgaaaaccttgaccaaagagaagcatggtgggacagaggctcattatggagaagtcctgcagaaagagatgttcctgtataactactggtacagggtacctatataactcgatatggggagatgtccagaccaatgctgggactctctggtataggaacttctggaagcattaactggtgagttctctagctctacagtcatccaagtaagattgaataacgttgttagagatgatgtttgagccttggatgaaggaatggagagggagaggaggtattgatatttatggaatgccttctttgtgccaaacgctcggacagaccttaatagaaatggcttaaccaacatagtgattttttttaaacatttatttacttcattttatgtgtctaagtgttttgtctgcatgtgtgtaagtgcaccacatgtgtgcctggtgctcacagaagtcagaaggtcctgttaggtctcctaaagctgaagttaccacagttatgaaccaccatgtgggtgttgggacccaaaccctggtcttcagcaagagtagcaagttcttttaactactgagaaatctctttagcccaaagttcttgatatcaatgccttgagccaaaggctgaggcatcctagagaggcatacatcatccttgccttcaaggaagaattctgtctagatggagagcccaatgcctgaggataatacaactaagattgtctgaactgatagagttaaaacaatactttctggaaagaagaaaacatgaagatatagaaaaggagaggaatttcatcagaagagaaaagtgggtcccaagaagcaggatggagaggatggagcacaaattttaggatcagaccctgagatgcaactttcagcacaagctgtctctttggaggcaaacccaagacactctggttgttgagtgtaaagtgggataggacagaaataaactaagtgtaatttattgtgctgtaacatctggaacccaatcctgctggcaacccctgagagacaatgtagaccacatttctctaaactgtcccatagaagaagagtggagccttggggttttgtccccaaccctgcacctgtcttgtttgtttgtttgtttgtttgtcctaagcgtaagactaagtacactctgggaagtaggaagaaagccccccagagagaagagcaggggtttgcagctagcagcttctctgtgagagctgacgatgtgagtggaacccctggagcacctgtgatggcatgtgcttacatttctcacccttatcagtgactctgctgtcccatcctatatgagagaaaaatgtgctgtatagctcaatcactgtagaacactggtgacttagacctttaggttacaggataaaaactaaggattctgcagtataaatcatgtcttcctttgttgctgcaagattcgttccatgtggacaaatgctcacaggcatttgttctgaccggagccctcttcccctccccttgaccttgcaggagcagtacgtgtttgtgcacgatgccatcctggaagcatgcctctgcggcaatactgccatcccagtgtgtgagttccgctctctctactacaacatcagcaggctggacccgcagaccaactccagccagatcaaagacgagtttcaggtatggacaaagccgatgtgcagggacttggttgctctgagttgtcctaacaaattcccacagcctgggtgacttacatggcaggcatttgcttttcacatctctgaaagcactgaagcccaaaagcaagctaccagcaaatgtagtatcaggggagagctcagacacgactgtggtttgtgagtggctgtttccttacaatttcacatggtgtgtgtgtttttttcattagggacactgatccccaattatttcccaaagaagctacatcctcgtatgccttgctgggagccaggatagcagcatattggacaggggtgcaggaggaagtgtgtgtgtgtgtgtgtgtgtgtgtgtgtgtgtgtgtgtgtgtgtgtgtgttttcaatcaatagcaatgacctaggaaacttcaaatgcatattgcgagcttttcttcatgagattggtgtgtgtgtgtgtgtgtgtgtgtgtgtgtgtgtgtgtgtgtgtgtctgcagtgcccagcagctgtggaaagcttttcacaccatcagattgcacagtcattagcaactattaaccaatcactcaatgatggctgacattggtttttctgctgtgattatgctattgaactgaggtcttagttaattcttgttgatgttgtggaatggacagaagtttataagctggtgtgaatttcatgcttccttgagtctggggagactgtagcctcggtgttttctccacaaattccattgcatggactccagaacttcttggaaatgaagactcttaggccccacccaaacctactgaatcacaaattacaatttaacaggatctctgtgtgcttaagccttaaaccatctcttagagcatggctcaggtactgcagatccacacctttgaaaccaggatgttcaaagctgcagctttggtctgagaggactgagtagaagacactaaagtcctagacatagcactgagtaaaaagctagcgttcagcccttcatcccatggccaagaccatgacatgtctgggcaatggtgctgtttgaactgggcagtaggtaaacaaataaaacctggttcatactattccagtcaggctgatattttagggcttctttaaccaagtaatctttattgtctcagagcagggacatgtcaagtgtcagagcaatggaaggcacacaaccctggacattgcacataagatctagtctattggctggtacagatctggtccctaactgtgcgacttactctacagagcacaaaccttgcaattttgtagacctactcattttccccacaatgccccttatccaccttgagcagcacatcctagcatccatccatcgtccttccatgttaacactgagaagaatcctggtaaataactttcttccttccagggtacttcaagtggtgtttaacattcattagggattctccaacccattccctgccatatgcccttctggctggcctcccttagtgctgtgctaacccagttgaacaacagtttgaatggttggcaggtgttgttagcccgtggcttaccctgtgtttgggcaccctgcccctgcagccttggcaccttgaaggtatcacaaagctcctggcaaagacccttagtccagaagtcctatagcagcaagcagggtataatagaatatcactgtcatgggaggaacatgggtttggggaaagaggtagcaaagccaagcttggaggagagacaggtgaattaagataagctgggatatcaattcccttcgcttagatacagtctcctctattcaccgttgtacccccacagacactcaacattgtgacacctcgagtgcggcctgaagactgcagcattgggctcttaccccggaaccatgataagaatcggagcatggatgtcctgcctctggaccgctgtctacccttcctcatctcagtagatggagagtccagcaactacatcaatgcagcactgatggatgtaagctgagccctggcagaaagcccttgggagtcattatagaaaaaagcccatcatggagatgactgaatcccagagcccaactggccaccttggttctgactggtggcttctgagaccatagttgccctggagcctcatgtccaaacccagatacattgtgtgcttttgtctctttggcttaaaaaaggtggacagaatggatcaaaagctggaaaaaatattcctataatatctcaagatgagttctatcctgcatgcttctatgtctggcaggagttcagttctggccatattcctcatgccaggccttggtctgggaccttgggagacaagaggtagtatagcatcttggagttccttctggtgtatctcaaatgagtcctcagataactcctgtgcagaggcaaagaggaagatagcacacagtagatgtttagtaaatggctgctgggcaacgagtagaagtaataaaaagataaagaagggaaacgggacatgtcccagatttccttgctaaggtaccatgcttcctcagtggcatgtcccagaagagaactgctccctgctgtggtttgaaattagggaaatattctgccccagtgttcccatgcctctgcctcatatgctctgcccctgtgtctttgggcattttctggttataaaattgcaccttcagggtctgcagacacttgtagcagtgtgaaccataggcattccagtctcacccaagtgctttgcagcagaagagactaagagactgaggaagatgtactcagggtattccagagaaataatggcaaagccagagctccagctttcactccagaattcatttattgtccctcccctgtttgtttgatcaatccactaagatgtgtgaaacttggcttctaaggctcaagaccaagagcgctattgtctgattggggatgcacaattacaagatctctcctcccctttccccacttcgaagtcatgttcatccagcccatgaggtcccccatctcacttacagacaagagagtagccacttcctggatcaagaccattacttctctgacctctgattgtcccatatgttctaagttttggaaacaaagaagtaatccaaggtcaattcccaactaaactctcaaatgacctgtcctgacttcagctcacaggtgcttatattctcctggctgagtgtagaagtggagagttgtgcctggattgtgttaaatagctagacttgctcaaagaagaagtaagtcttctggtctttctagcctaaggccttctaagatatctctctctctctctctctctctctctctctctctctctctctctctctctctctctctctctctccccctctctctccctctctctccctctctctctctctctctctgtgtgtctatgtctatatgcatgctgtctctgtgtgactgtctctgtgtatttctctctctgtgaatttgtcttcttatctttctcctctttctctctctctctgagtctgtctctgtctatctctatgtgtatttctctgtgtgtatgtatgtatgtttgtgagtaagtgtgtgtgtgtgtctctgtgtctctgtctctctttgagtctgcctgcttatctctctctttctcagagtctgtctatctctgtgtctctgtctttgtgtgtgtgtgtccctccaatcactgtctctctctccaagccacccctatcattatcccccaccttcccagcatcctctctctacattcttcatccaagcaagcatcaaggaagctcctgacctctgctttgcaggttagatgctgcctggagtcaaatgccttgtgccaagctctgattctgattgtcttctctttgtccacagggcatttctcttttgagtcatcactgcagcctttgcctttcttatatttaaaaaaaactccttatctgtattccagctcagtctgtgcattatctggtaaccatagcagctttgcctctagcagaaaaatatgaagtcctctgggttaatttttaatgtttcccttggtaaaggatgatgttatccacgaaatggattgctggctgatccctgaaacccggcaggagcgcagatctcgaacatattttcagataagactttgtcaggcgtgctggcctaatagagcatttatcatagagacagagaaagcaactagaaagaaaactaacattccctgcatgtcgggttctggacttgagttgtctcatctggcactggggtattactctccccattttttggagatctaatgagggtcagggtattttcattacttgctcaaagccaactggctttgagatggtggcaccaaagacccaagccccatccatgcctgctgtcttgaaagcctgagtttttaatttaatattattttactttatgtgtatgaatgttttgcctgaatctgtgtctgcacaccatgagtgtacctgaactggtgcctgcagagaccagaagaagggtgtgtgtgcctggtgcctacagctccctggaactggagttacagacaattgtgaacctccatgtgggtgctgggaattgaactcagatcctctgggaaagcaaccactgctcttaactgctggatcatctcaatagccttaggctggatttttttttccagtgtagaaatggctgaaaggccatgctgacataacctttgagcttggagacatttaaagggtctgtcccccaacacctattgttagaccatccactggtcaaaagaaggccctgggaaacaggaatccctagtgtagacgcaataaacatgtctataaggccttgccgtgctatttctgagcctctgtccttctcttcccatttccttctgacttgtgactctagagcaacagctctgactcccacctttcccggctaccttgataatggatcgaaacaatggctgattttcaggttgcacaagctaccaatgaagtggagtcactactcaatctttccaaatatcttcccctttggtattgtgtcacatggggcccaaatgaagctctcaagtttatactgggatcctcccaacctctgggtctcaatgtctatgtctgcaacacaaggacaaattaatgtatttactaatgctgtgttgtcgttgtttctaatgtgaaattaatgtatttactggtgctaggctatgattgtgtctaagtgtgctacccagactcatcactgatgccgaggaaaaaacttaagacaggaattgatccaccctgtagtgaacttgcttaccatgttttttctttttgtttttttagatttatttttattagttttgattgtgggtaggtgtgtgcatacctgcaagtggtgtgtgcatacctgcaagtatgctcacgtacataagtgtagtgcttctagagcccaacggtatcagatcccttggaactggaatacaaatagttgtgagttgcctgatgtgtgtgtgctgggtgccaaattcaggtcctctggaagaacagcaagtgctctcaaccactgagccatctctttagccctaattgccaagtgttgttggtttatttggttttaatttgcacaccacatacattgtacgacaaccatcccttttgatttaagtttcgttttccagaaaaagagctttgaaaccatctagatttaacagtgtttactgcctgactctccacaatgatatttaaaaataagaatggataacaaatgggtgggtagtgctggatgaatgaacacatgggtgagtcataatttatgggggacaaaactgggtttaaacctcaggtccacatgattctaatgactggctaactctactgccttgtgggctaaaggacataatgtcacctctggccaagctagctcagctctcaatccatcccaaagacaggaagatccctgctatcaggcccctctgaagccattggtcccctcctcagcatcataggcacaggaacttgtgggatccctgatatgacaagaggtgctaaggccaacagcacggtaaacctgtatccaggatttttcatttcacattgtaatgatgatttgctgagctctgagacataaataatttatttggataatccctatcctcatgacactttcctaatgaaatgtcttagtttggaggagaatgtgttcattatgggaaggtcccctttgccgccagggcacggagagataacagagcaggcaggtgctgtgtgaaatctgtttggcaggctcagggcctctggcagtcatcccagcctcatcatgatcagaatatcactgatgggtatatatttgactaaacctgtgtcactcttttgtcagagccacaagcagcctgccgccttcgtggtcacccagcatcctctacccaacacggtggcagacttctggaggctggtgtttgattataattgttcatctgtggtgatgctgaacgagatggatactgctcaggtaggaggcgaccgtggggctgctaaaggtgggccccagtgggtcatgatctgtatgctatagacttgcaaggagactctacaatggcccactggtgggcattgtcagactgtcaatactattccactgcctgcagagtcaaagagtctcctactgaatcctttaccaatgactcccataaactagtccccttgactatgggctttttctgagtacaccaagaacaagaccctgctgtctaagccttagacactggttaaagccttactctaaatcatgcagagatcagaaaaccaagatctcacacaaaacactgaacaccaccaccaaccccaaaggttcctcgccatgtagcctctgctggcagaacctggagtctgaacctgggaatcttcgctccctgactacatagccaagccttgactttatgccatagcccctctgagtcttttagttcccaccatcacgtgcctatattttcacacacctaagacattggacactcttttgggacagcctctggatacattatatgggatacaggagatgaaggtggcctttcagatttttgccatgttgtcttctctgtgccttgaaggaaacccaaagtcatttggtacactcttgtgtgagtgctggccttgcactggccttgggtgggaataattttctttctaaatgggcttgagctatagtttcagccttccaggagctgccagtcttgctacagagacagatgggcaagttatcccaggctcttgtggctgtgctataatagaggtcagcaatgaagtgccatgttgacctagagcagagagcaattaattctatccagagggtgaggaaagacttcaaaaggaaggtgatttggaccttgaagggagcaggggcgatctgttcatacaggggatgaatggctggagaaagacttctacatagaacaacagaggcaacagcaagtcagatggacatacagatagttgcttagagccagctttggttccagcaccctggggctgtatccatagggaaagaacgaggtaaggctggaacaagacagcagggctcagacagcagagaagttccctctgcaggttcaggagcctgggccttgaactaaagccctgataaaatcagactgttgtttgttaagtgataagatcctttccaccaatgaagcttttatgcaaacccagtgaatgaagcaaaagtaagcagccaaggtctgagcctgttaaagcaggaggtggggaccctgagcaccacccacactggtctttcatctgttcctcatagcccttggctagtcagctacctgagtccctttgcagtatgcttcccagaggctccaggataattagaaagcctttgctatccatgggggtggtccaaaggtttctaacttgtgttagaaagtagaatctaggaccagagagcacaggcatagagatcagagactggagaaagatgtgagttacgtttagagactgaggggtgggggatctgaacagaggaagcagcttgaaggagaactcgggctagatgtaagatcattttccagtgtgaagtccacacagttcaggtcgcagctgcatgcgaatgtggacaaaaagtcacagatggtggcaggtggcttgtctgggtgatcagacatccaggaagcacctggccaaaatggaaatgcaggaagatgggaggggtgagcatggacaggagcagagtgggggtgggggggagaggtgagtgtgtgttggaatgtgcccatgcgagttatccagaagaggtttcctctattcacacaacccatatttgttgagcatctgctactgctatttgctggaagctattctaggttcttggaatgtatcagtgaacaacacagacaaggtgaaatgagaatattcccgtcttccatgctctttctattctaaaggggagagactacccataaacaacaaatgctctataaggaattcaatcatatattgagacatgatgacaaggaagcataaatgaatattgtaaaactgtgttgggactcagatggactagggtagtcaaggaagggcttgagaatatgtgagcacagagttgaaggaagctagagagcaagccacaagttcctcccagggaacagtgtatccaggcagcgtgataggaaaatacctgatgctctcaaggagcaacagagtaatctgaggccagatcagggttaggtagtgagaatcagtggtgatatgagaagtgtaacagggttatgtgccatgtgaccttagtcaccatggggagaatttaggacttcactctgcaaaggatagggaaagtgacatgatttgacttttaaaagtatccctttgtctgctatgttgagactagagggagggaggtgatggtggttgatcataataaaagcagaaagcacacagagtgacaagaacagtcaggcacaggtgatggtggcttgagttatctagtaatatggtgtagagtctacatgtatcccaaaggtaggaagacaaaacgtgctttctggttaaaaatgggaggtaaaggatgatgccaatgtctgggccctgaagaatgaatggttagggaagagagataacaatagggaataaagtaaatccccctaaaagagagttctagaatattctagaatcggaaattatcaccacctgctctactgtttggacaagtaaggcaactcacctttatgaaattcgagcaaggtgggacctataaaagcctgtttgcactccttaaagttgtagttcaatggcagagcaagtgaccagcatccaagaagctctgggttcaatccccagctgaaggatgaaggtctagttgctcttttttctgtccccacccccccctttttttttttcaaaattgaagcttgggaacagaatgagaattgtgaaaacacttacttttggacctataatatcaaggtcactgacgttagcttgctcttttaaagagtagtccttggtgaatgatagatcttttagccccagatgttggcacagcctttgaaaaccaagtctctgaatgtaaaaacatcaggctccgaagcaccctgagactggctgctatacacagctggcaagcatcccctgaaactggcagatgagtagagcacttattgatataaatatcaccacagcagctgggtgccttgcaaaaataaacagtgataaagcatgagcaccagaaaggccgccttcggcacctggaggggtgtgtctttgaagtggtatgagcatctgcctgctagcatgcttttgccaaggcagctctacatgtgggccaggccagcaaggtggacgggtctactgaggccctaagcagctctcagtcgctgccaagagaaataacagttcagcctgtggcttgaccgtgaacgcctcgtggaggatggtcaagctacagatgggatgcaggaagatacggatagggagaagatgcgagctcccagaagcccttattgccttgtatcgctgtgggaatgagctctaaatcctatgctccttctttgaatgggccatctgccgtcatagtattgtttttcacagtagctgctaatcagagaattatgataaaattctccatgagagctgttgataaaagttgtcaacccctggagttatttctaactcttttgactctgagggctgggaagtaacttgctggataaagttcttgctttgcaagcatgaagactagagttcatacccccagaatcctgtaaagccagacgcggcagtgcaatctgaacgctcctacccagaagtaggaagcagaaacaggagagtccccagatgcttgttgtgggccagtaagcctggtgtgttcatggcaaacaacaaaagaccctgtcccagctgagctaggagatggggaccaacaccagagactgtcctctaacctccacatgtgcgcatgcactgttgaacacttgtgcccaaaagcccagcatatcagtgtacatacatacacacttacattgacattttttaaaacctttattacacttagttaaattgttcctatattatgcgggtgtcagtctctctgtctctctctgtctgaacacatgtatcatgggtcacttgtgaaaatcagagtacagcctatagaaggcagctttctttctacactgttagtgcccaggatcaaacacaagtcatcaggtttgttggaaatctttatgagccaactcaccaggctacataatttaaaaaaaaaaaaaaaaagcttcaaggtgctatggtcaactaggccaggcaaagtcctagatagaacacctaacatgaggcctgtaagtgagagatcttgcaagaaaaagccttttatcatttttataagcccatgaccagaccatagtacacaggaaacgggcatcagaaagaaacctgttgttgcttgggtgtgttcatgtttcaacacttgatctccatctggtggtagtggtggtaggaaagttatggaacctttgggaggtggcaccttgctggagaaagtgcctgaccaagagccttgaaatttggatcttcttcctgttcattttctacttcctgactgtgtcatgcatgtggccagctgcctcccatccctgtggctctgtgctttccctactaggagccaaaataagccattaaactgcatcttgttggggggtggggggggaggcttgtagctgtgatgagataagttctcctgtgtggccatggctcactatgtagtgtttagaaagctttggggattgtccataaaaggagtagattctctctctacctacaaaggactcaacatgcggtatcaaggtgagtggtttgagttggggcttgagtggcttccaacccagagggaggctctcaaaggccttgtcaatcattcattcatctacatacctttattgagagcttatcatgggctgagcacagacctagacacaacagaagaccaaagaggcacccaaatctgtgggtccccgggtggcacatattgtgcaaaaggaatgaatcccttgcaggctgtctttgattaaaagtaaaatctccctaggttgaaatcagctcagtacgaaccttaagtgaccgaaagacacaaagcaaacacaaagagagtttctttggtcaggatattttactacagaacagaaaagtagctaagatataccccagccacccaatctgttcccttttctgcaaaattcagctctttccctctcagtagctcctctcttcataatctccccataacctgcctcacacatactgagttcctatgggtaatgccctaaaccctccccttccttcccaggagaaagttcagctttggctttcataagagtaagtgtccacgccccatgcagaaatcacattcccacttagggggatgaggtgtgtggatgtcttttgatcaccatccgggtatttctttctgtgtcccctatacctttcacccctactcccacactctctcatctttaactggccacagtgccaaagccaattatgtaattctatagactctatttaaaggaatgttataatcatgacccagaattttaacaccaactcaggttattacagtactctacttaaattccacctaattcacttcgctgttaagtgacccacagttaatcctccccccacccccaccctggaagatcccaggaaccttgtgagctagagtcattcatttctgagactgtgatattacctaccctttcctacttatcaaaggattttttaattaacaaaaggcataagtaaggtgaaccaaaatatactttaaaatcgtttttccaaaaatagaaacatctgctagctttcattcaactatcagagcgtgtttattatcgtgatgactaacaagctttcagattccgagatgtttaatgagggaggctacctctgcctttgtcacatttcagacctgaattttcgaccctccccccaccccaccccacacacacagaggacttcttttcatggccttaacagttatggagatcactaggtggcataatgcacagcagctgatccaacactgtctacactgcctgcttgacttttgctgggtttaactcatcaacagacaacagaagtcctctgccttctgcgaagaagtgtgagcatttctaaatcatctgtcacaatgaggctggcttctctcctagagacaatcatgggccttacctatgcacatctgcagtggaaggccctcccttctggcagctccatcctccctagaccacggggaaacaagagtggcagggaagaacatctggtccaaactacagacttttaatcaacccatttgggagcatctaggtgtgtgggcgtgtacatggaggggtcaggggtcaattctgggtgcctttagcattctctacttcattagtttgtttgttgctttgtttgtttgtttgtttgtttgtttgttttgagacagggctcctcagtaaaccttaggctcatcacacacacacaaacacattcaacatacacatacataccgatagtaattaaaaaaaaaattaaaagaaagacatagaaggtacttcaaataggaacttcaatgcatttatttccccatctcccagccgcaacaaaaaaatcctctttggttttccaagtttctcttgagaaaaccctacatgcaaggtaaccaccttgcccctctgaccataacaatgcctgtctccacagctaccctgagctgactcttcaggaatttttgcaatgaagtcgagcctttgtgtattaatcccaaagataaactttcaaaatgactgaaacagaaagaaaaaaataaaaacctttctctttatccatcttgtcttaaataacgctccctaatggtgacagctcatgtgcccagatttctcactggagacatccctatgcaaggagacattaatatgcatatcccctcataataaactgtaggaattaagagacttggacaagttagcaagagaaaaagtatcaaagtggaatccaagcttttcatttttataggtgtaaatagaggtcattgaaactaggaaagagaaaataaggagggggggtttgaggaccacaagaatgatagaatacatgtgacttgtaggcaagaaggataccagagaaaggaagggcaagagaatggaagaggaggaggcttaacaaaactagttatgtctgaaaatacaggagacaaggaaacctgttacctctttgtttgcttaatcagtgtataaagtaaccaattagtgtttgcactcttagtttgccctgctccccacgtgatactctccaacccccagtctctctatctcctcccctctgcattcctaacaatctgccccagtattctccttgttgtgtgtgttgttagtctcttcataccacttattttttatttttattattattatttattattattatttagatattttctttatttacatttcaaatgttattccctttcttggttcccccttcaaaaaacccctatactctcccccttccccctgctcaccaacctcccactcctacttcctggccctggcattccctatactggggcacagagccttcatgagaccaagggcctctcctcccattgatgaccgactaggccatcctctgctacatatgcagctagagccatgagtctcaccatgtatactctttggttgatggtttagtccctgggagctctggggggtactggttagttcgtattgctgttcctcctatggggctgcaaaccccttcagctccttgggtcctttctctagttccttcagtggggaccctgtgctctgtccaatggatggttgtgaggatccacttctgtatttgtcaggcacgggcagagcctttcaggagacagctatatcaggctcctatcagcaagctcttgttggcatccacagtagtgtctggatttggtggttgtatatgggatgggtccccaggtggggcagagaagcacctaaaaaaaaaaaaaatgttcaacatccttagtcatcagcaaatcaaaacaaccttgagattctacctcacaccagttggaatgactaagatcaaatactcaggtgacagaagatactggtgaggatgtggagaaagaacactcctccattgctggtggaattgcaagctggaattggaaccactctggaaatcagtttggcagttcctcagaaaattggacatagtactaccagaggatccagcatatacccagaagatgctccaacatgtaataaggacacatgctccactatgttcatagcagacttatttataatagtcagaagttggaaagaacccaggtgtccctcaacaaaggaatggatacagaaaatgtagtacattcacaccatggagtactactcagctattaaaaaaatgagtttatgagattcttaggcaaatggatggaactagaaaatatcatcctgagtgaggtaacccaatcacaaaagaacacacatgatatgcactcactgataattggatattagcccagaagctcaaaatacccaagataatgaaactcaagaagaaggaagaacaaagtgtagatactttgatccttctcagaagggggaacaaaatacccatggaagaagttatagagacaaagcgtggagcagagactgaaggaaggaccatgcagcagagactgcttcacaccacttcttaaagctcttttcctttattcctcttctggaccctttctagcttcctgacctcttactagacttacacacacacacacacacacacacacacacacacacgtataaaattaggaactagaagctgaatatgagagagcataacatttgtctttctttgtatgctacttaaaaaatagccttgagaaaaaccaaataaatagattttaaaatatttttaaataaaaaaaagaaagaaagaaaataaagaaaagaaaaacaaaacaataaaaaaatcaaacaaaaacaaacaaaacaaacaacaacaataaaaaccaagggaaatggatccaggtaaacaagctcagtggataactggctggcagtgaccatggtgggggaagaaaactgaactctgaaagttgttctctaaactctacaagcaagtgacatgtgtgcgcatgcacacacacacacacacacacacacacacacacacagggaaatagagtgtactttgatcatgagccctaatgcatttgtttccccagttttcctatgcttcatactcaggacaaaatggcagccatgcgtttggacccaaagatggtcttaagctaaaccgagaggacatttttgctgatgaaaatcatttgcaagcctggaagggtcactgggtatggagcacttggcttctctccacactgtctcctatttcctgtttcatgatcacgtacagctatgagaagacccagaccccaacgatccctggcagctcagatgcacatctgttcacacattgcccaggcaaatggcacccagtactgcagttgtggtctcacaaactaggaagcccaagtgaaaggatggcactgctttcccattggaagggccctgcaaccttttccagccctctgggcattatgggaaaacaacctggaaaatcaaatgcagagaagagtcctaaaatttaggtctcttgtttgaggcatagtagaacctattagcttgagaaattggtctggaaatcttattaaaagagacaaatcattccacattctcctcaggctgaaaatatcgggggtaatagactctccccagtgcctcggacccatacgcctcatgtcaggatcacagctgaactctggcaaggctaaattcaatgcaggcaataaaggcaattattttttttaaatgggaagttctgattaattccagtttctctggccagtcacggacttatcgggaccagtccctcattactgtgaaggttgcaaggcagaagagccggtggcaaagagaaatgaagttcaaactgtagatctgtcattactgcacagctatgctgcagcagactgtccagctatggaggcccctgtgaccggccctcctatattcacattgtttctcagtatgcttgattaacccttggtggagagtttaggcaagccagggaccaataccttataaaacggtacctgtgcatctttgttacttggcaggacattcaacttgagaatttttgactttacagtgttaagtaaacaatacacgcttgatagacgctatgtagattttgatttgcatgtcatcctttggctggtgacatgtagtactctttggtgatgcttaggcagtagcagtgagctgcagatcccagacacccagaatcctgcagagaaacaactagccctttacagtatgcaggccttcctcgtaaagccatgaaggcctgtaggttatgtgtgccagatgccgtgtttgcagccctggggattgagcatacagcctcctgcatgtaaggcaagtgttctcacgctgatctatatcccccgttctaaattaattttctcccttatgatgtcatcagccaatgatacatttgtggagctgcaaccaaccccatcataagccaagtaatatgtgagaatgataataaccatacaatagcaataactggcctacaattggattataaatgcaataatgtcctgcagtgccaaaaaggtattcatttcatgccttatacaggatcaaaggatctattttcatgaattatctcctttatccccaaaacaaccctaatagagaaagagatggcaaacattggtgtgaaaggctagacagaaaatcttgtaggtgtctaaactactcagttctgaagctgcagccctgggtggcagcactcatagacaataaatgagcaggttaacatgtaagtgtcaattaaactttatttctaaaaaaacattttgtgagctggagagatggctcagaggttaagagcactggctattcttctagaggtccttagtccaattgctagcaaccacatgttggcttaaaaaccatctataatgagatctgctgccctcttttggcctgcagacatatatgtaggcagaatgctgtatacctgataaataaataaaagtcttttaaatattgttttttttttgttgttgttgtttgactatttaggccacagctgacaatcacagctaaagttaaatgatggtattcctaggcaagaatttctggtttctactggtaaaaggcaggggacttgatgcttcccttaggcataccccatgtcctattctttctttatcattctagctttggagtgaagaagagaataaaaagcatcatgccatgtgactccccagggtgaacttacagttcactaccatcaacaaaggagagagcaagtcttccttcccaggaaatccctgcctcagaggaggcccccttcactttcatggccacctctgtcaacatttacaagctggcatgggccatggttgaccttgccctgtgagacactcagtgcagaactgctgttagaagcttcagtgggtctttatgggtattgactatgccttcttaacaattcccaggccaccagtctatcacatggcctctctcctggcaccaatagctcccaaaatcctgtgtccccagttgtcatcctcctgtgtcccaaatctaagacaatgactaggcagggtccatctcaaagctcgtcagagaccaaggaatttgagtaagcatgcttttcccctccacagatacccagactcaagtcacccaatagacacaaaggagtgaggtagccatcctccttgatgatgctcatacactgaggaccaggactcctcagtctctccagggctacatcagattgacatgattctcaagaagtgttgtgtctattatggtatgcctagctgcatcctagcctgtgctcataactgttcccatggctatggcgaacaaaactggcttcagacgctggaggacggaaacaaatagcctctagctgcgagacaccgtcttagagtaagaagtgactggctacaggctctaaactctgtgtgtagttcccaagtccagaaatgttgtgaagacagtcaacaagctctcttggcacccagtgaatatcctcatggtacaagggagatgcttatcctcagtgtacacatgagagcagaggtctggggggaaaaaacctatatgcttagagcctggatttggagcaaagactgtcagatgccaaaccctgtactttataaaacagtctgaatatgacggggaacagtcaccgtagacttctctagaatgggaaatagtttcctcgattgtagtagaatgaaaccagattatgcctacctttcacttctaggtcctaaaattctgacagaaacattgacaggtagatgctcttttccccatttaaaagatgagaagactggggtccagaatattaaaaaatagtttgaagtcagcatagcaaatgtttttaagtctgcctctatgctcaaagagtttaacattttagaaccaaagaaattggacctgtacctcaataagaaagctaagtacagtttgcttcctggtcacgtgtcctgctcataagaagaaaggctccgtgataaatagcatttaatatgcccccttctttgccctcagccttctgtgacctcttcttttgcttcagctctgtatgcagtactggcctgagaagacctccgggtgttatggtcccatccaggtggagtttgtctctgcagacatcgatgaggacatcatccacagaatcttccggatctgtaacatggctcgggtaagtacagagccaccatggctcactgttccccttctttgcagaacagatggaggtggctgggagaggatcccactaagaccgccaagagtctgtgtttctctctcctgataagctcttccttggggaagtgatgtctttgctgactccagagccagcaatggctccagcacagttagatgcacagagccccatccaacctgccagctgcctgtttcctgacacgctagcaaccgtgtagacaaaacttctcagacattagctcttccccatgctggcacatcgctctggtacccttcagttgggtcttatgagctttggacaaggccctacaaatactgaacatggaaaaaataattagtgactttcaaagggatagttactggttaaacactgggtaggagagagcacaataatagtccatgaaacaagtattgctctctactgagaacctagaaaaatggtccttaggcactgccctcagagtttactatcaagtagaaacacgagataaactgtaacagatgagcttcagagagaaagacttctgcttggtagaataaagaaaagcattgctaaagaaagggacatcgggatgagttggaagactgacaggagttttcaaggcacagagtaagttaagcagagtacacagtcacaacattaggtataaggacactctgagcccatggtggcacaactgagaccccactcaatctgacttctactctattacagtcccctccaccccagccagaatctaaaaggcttgcatccttaggtacctcccagcagaacagccctaaccaatgctctgttctcagccacaggatggttatcgtattgtccagcacctccagtacatcggctggcctgcataccgggacacgcccccctctaagcgctctctgctcaaagtggtccgacggctggagaaatggcaggagcaatacgacggaagagaggggcgcactgtggtccactgcctgtgagtgctgtggagctggggtgatgggtgactgggtgtctgaaagtgctgaaggctatgctggtggcatagccagtctgaggcatatccagtagtttctcatctcaacagcccttatagtccattgataatgcatccataggaattagaatcttttgatgaactgaggtgcccatttttttctaaactgtggctacatgacaggctgctgaagcagaacatagtaggcagattgcttcccagtgctcccaacacagatatgagttctacaccctaaagtgggtatgcatatcatcctgctaggcatagaaagcttgggataaagtggctcccattgaccagagtacccttgtgttatttcctgaagaagaaaaaggacagtattttcttagcttaatttaagccaggcatttaaaaatgaatcattttatcccatctatgaagcagagactatcattttgcagtaagaaaactgaaagcaaaaatgggtagggaaccaagctagttgcagaagagactcagatggaatccaccagactgagacctaacatgttgtctactgtcccacagtgtgtctaggaagagggaaggtggggaggagcattcaggatgaggacctcctgggcagggtgagaacctcttggatttgctcattgtgtttgcctcctaggctataccctaccttgtgcttagtaggaacagggacacagagcatgaggaaaggacactaccgcagtagatggcttttcagggccctggaatctgtgtctttctgtgggtgcagtgagctcaagaccagttactgggatggtctttgtttcctggcttaggatgggaagagcaggggaaaaaaagtacttaattacatgacctttggtttccccatctgtccactggctaaagtagattatgtttacaccctgtggtgtttaagcataaagattttagaaaagaataatgtatctgccaacagagagatttaaaactgccataacagaaaatatacaattttaagtattgtttcttaagagcagatgtcacagcatccactatgaagaagcattctatgtagagttcaaacccatagaatatctgcagccataagagacatacataggatgttagatcaacaactatcaactctttagagaatcatttgtggggaagagaacaaggggcccttcctctttaaaaatattgtatttcagaaaatatgaaccaaactcctctctttttgtcaggataattctttctggagtgaatggaggcattaattacctttcattgaccccagagttggcctgtcttttacaaagctgctaattgtccacttccttccagataggtggttcatacatatcaggaaggtcagaacttagagcaggttaaacacacatgtgcacactcagagctaaaaagctcccaccagtagaaacttttctctaaggatacagaaatgcagactctagatgtggtgtcagacatgccaagctgtctctaactatacctcgtgactggtttccaaccctgactccctccagttctttcccacacattatatgccccctcattagtatggcacagcatccattccttgagactccagaaggccctgagatgacagattctttcacattgtcttcttggtccttgggttcttatttcaaaagatattaactctccttgctaggaaagcttcctactctccagtaattttatatcctagcctatttgggaggggtggtttggttggttggttggttggtgggttggttggttggttggttggttggttggttggctggctggctggctggctggctggttggttggttggttggttggctggctggctggctggctggctggctggctggctggttggttggttggttggttggttggttggctagctggtttgttgggggattatggttgttttcacccctatctctcctaccctagccattcaggacaagtgtgtcagtctaccaatagggacttgggcatccttgggacccgcaggtatcatgacagtcactgaaattcagggacccaccagttaagggaggataattttctatatttgacacatctggttaagtttcctgtgggtgaaacatctgggagattgactaagtactttagtgtctgcccagatgttccttagacacagaccattacatgaaatcattagctgcctttggcagcctgcccaggagttcagagtcaggtaagttcctgaagattatttctgtaaggataatttacagcttcagaaagaaggagcaatggaggaatggccattccaagaacatgcagtccttatatctaagacaagtaggatcatatttaaagaagatttacaagaggaaccatggaattggcctggtatttcagaaacactgagccaatgtccaaggaccacagcccaaagacaggactagctagctcaggactcatcaattattgtctttattagaagataggaagaaatactaataaaaccacctagtaatgtccactgttttcactggatgtctggtagacctagagtatccttttgggcatggataaaggtaccacatgtacaaagacataataatgcagatcagtgtgccccaatcaagcataaaatgcttgtagagccaaaaaaaaaaaaaaaaaaaacctaaactcccaaaaagtcatataatctaacctcttaattaggtaaatggggaacttggaacactgactaaggagtgtctttcccaaagtcaaagaagattcacagccctaatgggatttaaactcatggctcagactaaagttcgaatggtcgtctgaccacactaggtctgctaggacaggtactccttgctccaaaatcctgggacttcgactcacctgttctctctttgtttagaaatgggggaggccgcagtggaaccttctgtgctatctgcagtgtgtgtgagatgatccagcagcagaacattattgacgtgttccacattgtgaaaaccctccgcaacaacaagtccaacatggtggagacgctggtgagcatccaggaaccattatccagcacccaaagtcttcatgttccccagacctgaaaactgtgactgggcataggacacaccttcaataactgggtctcatttgaatacctatagtctgtgtttctttttctttccaaccttagcaatttctctttcctgcagggcaatctaaatattaatcccagtccacctactttgttttactttctgcctaccccctaagaaaatgtcgttaattcagacttcaaggaaagattctggaatagtagtttgtgaattatggtttcaattcagcccaagcctattctaattcacttatgctaatattttacaagatcaagcattaaactaggggtgctttggataaaggatagtgaagctagaaggaaggcagagcccagatgggaagacctgctatagtggtggagatgacccatacagagaacttgactatacatctttaaagtggatgataagatctcacacagaatgtggctcaaaggctggtagagcagcattacctgggaagtgtctaggaatgcagaatcttgagaatcccaaacggaccgagtcaggatcttcattttcagtgcacacccctacatgttctgcacaaagcttatagactgagaacctttggtgtgtgatggaataactgaaagtgagcaatcacaggtggggattctgggaagtgtaggcagaatatgcatcagtcaggagttgaaggatgttcagacatgagatacggctacttacttgatttttagtatgcttacaggtagttttctccaaaatctgcatctctaatctaatgcattcttttcttttctttctttctttctcatctcctcctcttcctctcaggaacagtataaatttgtatatgaggtggcactggaatatttaagctccttttagactgattggatggggagcctgccagagttcagcggcggctgcagctgcccctctatttctgtgactgacaatgactggtctcaggagctccgaggtggtacacctgctcagctccaggaagaagactgctggtctcatgctctgcagcttctgtgggggtctgtagctgtgggagatgcggttctgatggggactagcatcccttctacacctgacagcatcaggcccacagaagtctacccacaagcaaggccctggacttccgattcccagacctcttgcttttgttcgttctgagtttgttactctcatggcaagctgactgtgcaggtgctggggtgtggggagatggccagtccttcccttaccatccttaggagtatcaggggtggaagttcttctccatgctatcctgcaaaagcatggattgtagtttgagggatcactgtgttattggttcctataatctcccacaggggcctctggcatgagacagctgccaatctggatcagtgtgactcctggataccccctaggccaagcagaaagctttttcatcttacacctaacccatcctgggttctactcactacaaccatctccagccaggccttgaccctctgtaatctcccggccaacctgctgtatctgtatcacacttcggcaaaggtttcctttgcttttccatagtctgtagggagaggagggctcataggaaatgttacagtatctctttaatctttgtagaaaaagccactctcatggggcagggctcttgctggcctttacagtacaaccctgcgcttcttaggtggtgctttctgtgggaaagacaaacaaaaaaagctttgagtgttttcccaagtacatgtgaaaagaaactcttgtgagagtgtaaaattctgtattctcttatgtcaaaagaagaaaaggataggatgggagtttggatgtgtggctgtcagataactctcttggacttttatttcctggtcatacccataaaaagacccactgtaggatgacacagccattgaacacatgaaatgggacctctgggatcagtccctgggttgtgggtgtggaaatacagaagcacctttataatttgtctctccaaatttgaactctttccttaaaaaaaaaaatccagctgccattttgaaattggctactggggccccagcttggtttatgatagaataagcaggtttaggctgggggccaagtcttgctcaaagcatgaattaagggaaaggagagaacattagtgaagtgtttcctgcaagccaagtgccatggttaccaccttccatgtgacatctcatatagtcagtagcacccctaggaacccctagagaatgctctcatcatatccatttggtaattgaagaaacctgagcatcttcttcagtgatggaattctgggttccaaagacaggtaatggcaccgaaaccccccccccaccattttcctcatgctttctcagccaagcaattatttttatggaaccaaaataaggctagaaactttggagcagagagagagaactccaggagtagaaatttaattctttctttctgatagcagttcttcttggtagcccacactttcagatatattttattaactcattcgcagttccccagaaaagctagtcttatctaatttcatcattgctaaaaacaattcccgtgctccctcaggctacaagggagccagcttgggaagctctgtagcctgggttgagccacaatatctgacagccttaatagccagaggtctaggaaggtctatcttgcagactgatccagtctcggtgtatgagggacacagaatccaataaggtacacatcttgcccttcaggcccactgtattgtagagaagctga

SEQ ID NO: 126 - DNA, 6191 bp, Mus Musculus
ttggcgcgctcgccctctgcctgctccggctcctgctcctggggctgcagcggccgccgttgcccggcgccggagcgcagagcgccgcaggtggctgttcttttgacgaacattacagcaactgcgggtatagcgtggctctgggaaccaatgggtttacctgggagcagattaacacatgggagaagccaatgctggacccagctgtgcccacagggtccttcatgatggtgaacagctctggaagggcttcaggccagaaagcccatcttcttctgccaaccttgaaggagaatgacactcactgcattgacttccattactacttctccagtcgagatcgctccagcccgggagccttgaatgtctacgtgaaggtgaatggtggaccccaagggaaccctgtctggaacgtatctggcgtcgtcactgagggctgggtgaaggcagagcttgccatcagcaccttctggcctcatttctatcaggtgatatttgaatccgtctctttgaaaggtcatcctggttacatcgctgtggacgaagttcgggtccttgctcatccatgcagaaaagcacctcatttcctgcgactccaaaacgttgaggtgaatgtggggcagaacgccacgtttcagtgcattgctggtggaaagtggtcccagcatgacaaactttggctccagcaatggaatggcagagacacagccctcatggtcacccgggtggtcaaccacagacgcttctcagccacagtgagtgtggcagacacctctcaacgcagtatctccaagtatcgctgcgtgatccgctcagatggtgggtctggtgtgtccaactatgcagagctgattgtgaaagagcctcccacgcccattgctcccccggaactactggccgtgggtgccacctacctgtggattaaaccaaatgccaactccattattggggatggccccatcatattgaaggaggtagaataccgcacaaccacaggaacctgggccgagacccacatcgtggactctcccaactacaagctctggcatctggaccctgatgtggagtatgagatccgggtgctgctcacacgaccaggagaagggggcacaggaccaccaggaccacccctaactaccaggaccaagtgtgccgatcccgtgcatggcccacagaatgtggagattgtggacattcgggctcggcagctgaccctacagtgggaaccctttggctatgcagtgacccgctgccacagctacaacctcacagtgcagtaccagtacgtgttcaaccagcagcagtatgaagctgaagaggtgatccagacatcttcccactatacccttcggggtctacggcccttcatgaccatcagactgcggctgctactgtccaaccctgagggccggatggagagtgaggagttggtggtacaaactgaagaggatgttccaggagctgttcctctcgagtccatccaagggggtccctttgaggagaagatctacatccagtggaaacctcccaatgagaccaatggggtcatcacactctatgagattaactacaaggctgtgggctcactggatccaagtgctgacctctccagccagaggggaaaggtgttcaaactccggaatgaaacccaccacctctttgtgggtctgtaccctgggactacctactctttcaccatcaaggccagcacagccaagggctttggacccccagtcactactcggattgccaccaagatttcagctccatcaatgcctgaatatgacgcagataccccactcaatgaaacagatacaaccatcacggtgatgctcaaacccgcccagtccaggggagccccagtcagtgtttaccagctggttgtcaaggaggagcgactccagaagtctcggagagcagctgacatcattgagtgtttctcagtacctgtgagctaccggaacgcctccaacctcgattcgctacactactttgctgctgagctgaagccctccaacctgcctgtcacccagccatttacagtgggagacaacaagacctacaatggctactggaaccctcctctctccccattgaagagctacagcatctacttccaggccctcagcaaagcaaatggagagacaaaaatcaactgtgtgcgtctggctacaaaaggtgcttccactcagaattctaacactgtggagccggagaagcaggtcgacaacacggtgaagatggctggcgtgattgctggcctcctcatgttcatcatcattctcctgggggtgatgctgaccatcaaaaggaggaagctggctaagaagcagaaggagacccagagtggagcccagagggagatgggtcctgtggcctcgactgacaagcctaccgccaagctcggcaccaaccgcaatgatgaaggcttctcctccagctctcaggatgttaatggattcacagatggcagccgtggggagctgtctcagcctaccctcaccattcagactcatccctaccggacttgtgaccctgtagagatgagctatccccgggaccagttccagcctgccatccgggtggcggacctgcttcaacacatcacccagatgaagagaggccagggctacgggttcaaggaggaatacgaggccttaccagaaggacagacagcttcgtgggacacagccaaggaagatgaaaaccgcaataagaatcgatacggaaacatcatatcttatgaccactctcgagtaaggctgttggtgctggatggagaccctcactcagactacatcaatgccaactacattgacgggtaccaccgaccccggcactacattgcaacccaaggtccaatgcaagagacggtgaaggacttttggagaatgatctggcaggaaaactctgccagcatcgtcatggtcacaaaccttgtggaagtgggcagggtgaagtgtgtccgatactggccagatgacacagaggtctatggagacattaaagtcaccctaatagaaacagagcccctggcagaatacgtcatccgcaccttcacagtccagaagaaaggctaccatgagatccgggagctccgcctcttccacttcaccagctggcctgaccacggtgttccctgctatgccactggccttctgggctttgtccgccaggtcaagtttctcaatcccccagaagctgggcccatagtggtccattgcagtgctggagccgggaggactggctgcttcattgcgattgacaccatgctcgacatggctgagaatgaaggggttgtggacatcttcaactgtgtgcgtgagctccgggcacagagggtcaacctggtgcagacagaggagcagtacgtgtttgtgcacgatgccatcctggaagcatgcctctgcggcaatactgccatcccagtgtgtgagttccgctctctctactacaacatcagcaggctggacccgcagaccaactccagccagatcaaagacgagtttcagacactcaacattgtgacacctcgagtgcggcctgaagactgcagcattgggctcttaccccggaaccatgataagaatcggagcatggatgtcctgcctctggaccgctgtctacccttcctcatctcagtagatggagagtccagcaactacatcaatgcagcactgatggatagccacaagcagcctgccgccttcgtggtcacccagcatcctctacccaacacggtggcagacttctggaggctggtgtttgattataattgttcatctgtggtgatgctgaacgagatggatactgctcagctctgtatgcagtactggcctgagaagacctccgggtgttatggtcccatccaggtggagtttgtctctgcagacatcgatgaggacatcatccacagaatcttccggatctgtaacatggctcggccacaggatggttatcgtattgtccagcacctccagtacatcggctggcctgcataccgggacacgcccccctctaagcgctctctgctcaaagtggtccgacggctggagaaatggcaggagcaatacgacggaagagaggggcgcactgtggtccactgcctaaatgggggaggccgcagtggaaccttctgtgctatctgcagtgtgtgtgagatgatccagcagcagaacattattgacgtgttccacattgtgaaaaccctccgcaacaacaagtccaacatggtggagacgctggaacagtataaatttgtatatgaggtggcactggaatatttaagctccttttagactgattggatggggagcctgccagagttcagcggcggctgcagctgcccctctatttctgtgactgacaatgactggtctcaggagctccgaggtggtacacctgctcagctccaggaagaagactgctggtctcatgctctgcagcttctgtgggggtctgtagctgtgggagatgcggttctgatggggactagcatcccttctacacctgacagcatcaggcccacagaagtctacccacaagcaaggccctggacttccgattcccagacctcttgcttttgttcgttctgagtttgttactctcatggcaagctgactgtgcaggtgctggggtgtggggagatggccagtccttcccttaccatccttaggagtatcaggggtggaagttcttctccatgctatcctgcaaaagcatggattgtagtttgagggatcactgtgttattggttcctataatctcccacaggggcctctggcatgagacagctgccaatctggatcagtgtgactcctggataccccctaggccaagcagaaagctttttcatcttacacctaacccatcctgggttctactcactacaaccatctccagccaggccttgaccctctgtaatctcccggccaacctgctgtatctgtatcacacttcggcaaaggtttcctttgcttttccatagtctgtagggagaggagggctcataggaaatgttacagtatctctttaatctttgtagaaaaagccactctcatggggcagggctcttgctggcctttacagtacaaccctgcgcttcttaggtggtgctttctgtgggaaagacaaacaaaaaaagctttgagtgttttcccaagtacatgtgaaaagaaactcttgtgagagtgtaaaattctgtattctcttatgtcaaaagaagaaaaggataggatgggagtttggatgtgtggctgtcagataactctcttggacttttatttcctggtcatacccataaaaagacccactgtaggatgacacagccattgaacacatgaaatgggacctctgggatcagtccctgggttgtgggtgtggaaatacagaagcacctttataatttgtctctccaaatttgaactctttccttaaaaaaaaaaatccagctgccattttgaaattggctactggggccccagcttggtttatgatagaataagcaggtttaggctgggggccaagtcttgctcaaagcatgaattaagggaaaggagagaacattagtgaagtgtttcctgcaagccaagtgccatggttaccaccttccatgtgacatctcatatagtcagtagcacccctaggaacccctagagaatgctctcatcatatccatttggtaattgaagaaacctgagcatcttcttcagtgatggaattctgggttccaaagacaggtaatggcaccgaaaccccccccccaccattttcctcatgctttctcagccaagcaattatttttatggaaccaaaataaggctagaaactttggagcagagagagagaactccaggagtagaaatttaattctttctttctgatagcagttcttcttggtagcccacactttcagatatattttattaactcattcgcagttccccagaaaagctagtcttatctaatttcatcattgctaaaaacaattcccgtgctccctcaggctacaagggagccagcttgggaagctctgtagcctgggttgagccacaatatctgacagccttaatagccagaggtctaggaaggtctatcttgcagactgatccagtctcggtgtatgagggacacagaatccaataaggtacacatcttgcccttcaggcccactgtattgtagagaagctga

SEQ ID NO: 127 - protein, 1431 aa, Mus Musculus
GALALCLLRLLLLGLQRPPLPGAGAQSAAGGCSFDEHYSNCGYSVALGTNGFTWEQINTWEKPMLDPAVPTGSFMMVNSSGRASGQKAHLLLPTLKENDTHCIDFHYYFSSRDRSSPGALNVYVKVNGGPQGNPVWNVSGVVTEGWVKAELAISTFWPHFYQVIFESVSLKGHPGYIAVDEVRVLAHPCRKAPHFLRLQNVEVNVGQNATFQCIAGGKWSQHDKLWLQQWNGRDTALMVTRVVNHRRFSATVSVADTSQRSISKYRCVIRSDGGSGVSNYAELIVKEPPTPIAPPELLAVGATYLWIKPNANSIIGDGPIILKEVEYRTTTGTWAETHIVDSPNYKLWHLDPDVEYEIRVLLTRPGEGGTGPPGPPLTTRTKCADPVHGPQNVEIVDIRARQLTLQWEPFGYAVTRCHSYNLTVQYQYVFNQQQYEAEEVIQTSSHYTLRGLRPFMTIRLRLLLSNPEGRMESEELVVQTEEDVPGAVPLESIQGGPFEEKIYIQWKPPNETNGVITLYEINYKAVGSLDPSADLSSQRGKVFKLRNETHHLFVGLYPGTTYSFTIKASTAKGFGPPVTTRIATKISAPSMPEYDADTPLNETDTTITVMLKPAQSRGAPVSVYQLVVKEERLQKSRRAADIIECFSVPVSYRNASNLDSLHYFAAELKPSNLPVTQPFTVGDNKTYNGYWNPPLSPLKSYSIYFQALSKANGETKINCVRLATKGASTQNSNTVEPEKQVDNTVKMAGVIAGLLMFIIILLGVMLTIKRRKLAKKQKETQSGAQREMGPVASTDKPTAKLGTNRNDEGFSSSSQDVNGFTDGSRGELSQPTLTIQTHPYRTCDPVEMSYPRDQFQPAIRVADLLQHITQMKRGQGYGFKEEYEALPEGQTASWDTAKEDENRNKNRYGNIISYDHSRVRLLVLDGDPHSDYINANYIDGYHRPRHYIATQGPMQETVKDFWRMIWQENSASIVMVTNLVEVGRVKCVRYWPDDTEVYGDIKVTLIETEPLAEYVIRTFTVQKKGYHEIRELRLFHFTSWPDHGVPCYATGLLGFVRQVKFLNPPEAGPIVVHCSAGAGRTGCFIAIDTMLDMAENEGVVDIFNCVRELRAQRVNLVQTEEQYVFVHDAILEACLCGNTAIPVCEFRSLYYNISRLDPQTNSSQIKDEFQTLNIVTPRVRPEDCSIGLLPRNHDKNRSMDVLPLDRCLPFLISVDGESSNYINAALMDSHKQPAAFVVTQHPLPNTVADFWRLVFDYNCSSVVMLNEMDTAQLCMQYWPEKTSGCYGPIQVEFVSADIDEDIIHRIFRICNMARPQDGYRIVQHLQYIGWPAYRDTPPSKRSLLKVVRRLEKWQEQYDGREGRTVVHCLNGGGRSGTFCAICSVCEMIQQQNIIDVFHIVKTLRNNKSNMVETLEQYKFVYEVALEYLSSF
